United States Patent Application Publication US 2006/0134663 A1 - sequence listing, part 19

SEQ ID NO: 28765 - DNA, 6466 bp, Homo Sapiens
ctctcttgctcgctcgctccctctctctcctgctggctgcctgttctaggaagccagcgcggagaggggggggatgcacagcacaggggagagagattgcgcatgttggtcagtcgtgttttaaagagtacagtgcggggaggctgagaggggcgcatgcaacaacaacttttggaaggatggaagagaagaggcgaaaatactccatcagcagtgacaactctgacaccactgacagtcatgcgacatctacatccgcatcaagatgctccaaactgcccagcagcaccaagtcgggctggccccgacagaacgaaaagaagccctccgaggttttccggacagacttgatcacagccatgaagatcccggactcataccagctcagcccggatgactactacatcctggcagacccatggcgacaggaatgggagaaaggtgtgcaggtgcctgccggggcagaggccatcccagagcccgtggtgaggatcctcccaccactggaaggcccccctgcccaggcatccccgagcagcaccatgcttggtgagggctcccagcctgattggccagggggcagccgctatgacttggacgagattgatgcctactggctggagctcatcaactcggagcttaaggagatggagaggccggagctggacgagctgacattagagcgtgtgctggaggagctggagaccctgtgccaccagaatatggccagggccattgagacgcaggaggggctgggcatcgagtacgacgaggatgttgtctgcgacgtgtgtcgctctcctgagggcgaggatggcaacgagatggtcttctgtgacaagtgcaacgtctgtgtgcatcaggcatgctacgggatcctcaaggtgcccacgggcagctggctgtgccggacgtgtgccctgggtgtccagccaaagtgcctgctctgccccaagcgaggaggagccttgaagcccactagaagtgggaccaagtgggtgcatgtcagctgtgccctatggattcctgaggtcagcatcggctgcccagagaagatggagcccatcaccaagatctcgcatatcccagccagccgctgggctctgtcctgcagcctctgcaaggaatgcacaggcacctgcatccagtgttccatgccttcctgcgtcatagcgttccatgtcacatgcgcctttgaccacggcctggaaatgcggactatattagcagacaacgatgaggtcaagttcaagtcattctgccaggagcacagtgacgggggcccacgtaatgagcccacatctgagcccacggaacccagccaggctggcgaggacctggaaaaggtgaccctgcgcaagcagcggctgcagcagctagaggaggacttctacgagctggtggagccggctgaggtggctgagcggctggacctggctgaggcactggtcgacttcatctaccagtactggaagctgaagaggaaagccaatgccaaccagccgctgctgacccccaagaccgacgaggtggacaacctggcccagcaggagcaggacgtcctctaccgccgcctgaagctcttcacccatctgcggcaggacctagagagggttagaaatctgtgctacatggtgacaaggcgcgagagaacgaaacacgccatctgcaaactccaggagcagatattccacctgcagatgaaacttattgaacaggatctgtgtcgaggcctgtccacctcattccccatcgatggcaccttcttcaacagctggctggcacagtcggtgcagatcacagcagagaacatggccatgagcgagtggccactgaacaatgggcaccgcgaggaccctgctccagggctgctgtcagaggaactgctgcaggacgaggagacactgctcagcttcatgcgggacccctcgctgcgacctggtgaccctgctaggaaggcccgaggccgcacccgcctgcctgccaagaagaaaccaccaccaccaccaccgcaggacgggcctggttcacggacgactccagacaaagcccccaagaagacctggggccaggatgcaggcagtggcaaggggggtcaagggccacctaccaggaagccaccacgtcggacatcttctcacttgccgtccagccctgcagccggggactgtcccatcctagccacccctgaaagccccccgccactggcccctgagaccccggacgaggcagcctcagtagctgctgactcagatgtccaagtgcctggccctgcagcaagccctaagcctttgggccggctccggccaccccgcgagagcaaggtaacccggagattgccgggtgccaggcctgatgctgggatgggaccaccttcagctgtggctgagaggcccaaggtcagcctgcattttgacactgagactgatggctacttctctgatggggagatgagcgactcagatgtagaggccgaggacggtggggtgcagcggggtccccgggaggcaggggcagaggaggtggtccgcatgggcgtactggcctcctaactcacccccttccctgtcccaggccctgccctggtccccccacaaggcctcagcccagtcacaactgccatttccagtctctgctgagtgtcccagaccctcgaggctgccactccgtcgtggttttatttttaatatagagagagttttgaattctacactgttgtctttcctctgtgctggcctaggacattaggattccttccacggctccggccgctaggaccctgccaggtcccgcgcaccatccctgccctgcccacgtggtattgctgggctcctggctagatgcaagcaaggtggacaagagctcaggactccagcccactgccactgggtgacacagactgtcgtttgggcattatttcatggcagatgggccagtccagggcctaccccgccttgcccccagatcccactggggtccatttggggggtcctgctacactccaccgatccccaaggaagtataataaacgatacccagccagagtctactcactgtcacaagcacaacgagtttatatgagaaagcactgagggggtgcagagggcccgctagttccaggggaactgaaagctgttcctgatcagcccgtatcatctgaggcctgcctgcccaccctgccaccctcccctcccttgctgctctgcccctgccagtgcccagcccagcggctctgggaaggggttcccagaatccctcctgagctgtgccatttactcaggggactcccaaacagccagctgccagtgcaggtggagggctgtaggggagggccagtgcccagacagggtcatggggctcagaccagcccactgtagagaatcactctgaggctccaacttccttccttccttcggggccagtctcggccgaagtctggtcacgctcagacagagctgaccagaccagaccgtttgccttttcaagtttcctagtcctgctacaagatgagcttcttccgtggtttccttttggaaactcctccttccaacaagcagtgggatcccggggcccagggcgggccggtgttggccgctggggctgttgtaagtcttgctggatgttcccctgttcctgagccttaacccctcgcacagccatcccccccccccgtcctgccatccccccccgccgtcctgccttccccaccccacccttaggtcccaggtagttgctctgaagagtttcagtagagtggccccagggtgatagctcagggaacaacaaaaaaggaattccgtgaaaacatttttttttctttgatgaattactcctgggtcacttccaccactggtaaagccagaacttctccaaaaagaaccttgcaaaaagtccagtgaatcagtcgaatcattctgtggatgccaaagaatattttgaccataatacagcacagcctggacctgacaacttgtcatttggacttttttttaaatggagttctttagcaacaaagtatagaaacatgttcattgcacacacccaaggagaagagctcaagcgcttggaagaggatgctttgctgctgctgaagtgtacctgggtgttagatttcagatcctgggctgagcccactgtgagctttcctaaactgtgagactcacagaggggaaagatactgacggtgaaaccagcatggaaaacgtctttaccatgtggttccctcctccccaaatacataaagcaaataagcaggatggggaacagcttgaccttcatccacccctaactccaaaactatcaaggtacgacagtggcattgtcatcgacactcaatttcatgtgaattttagcaaaacaggaaacaaagataatgactcagttcagaggatcggacaaatgtgtctagtccgggtggactcggagggagtggggtgggcttcaaggattctgggcgttgggatggcatgagctaccctgtagagtttagtctgcctgcccgccttggtagtagtgaccagtcagtgtcagcatcagtgtcccaaccccagtctctgtttactgcctttgaacagaacttcttccttccccatgctttgggtcacctcgggctgcaaccctgtctgtgccagattgcccggtctgaccctgcaggaagcaaagaggtgagcttaaagaacaaccaaactctgccaggggtcccagaaagcccagggtccagcagtctcagcacttggccccttgccccttcacaccatcctggggcaggggctgggcctccctggtggcaggggtgggtggagaattagggagagggtgcaacgagtctggccccttgcctcgggctggctggtgttcttccaagagcctctgctcacattgttggcctctggattctggcccttcttcattggctgttgctttggactggactgttgctgagcctgtgtcctgcagaacccagatgtctgttaggctggctggctgctgcgaggggaggggggtggcctttcatttggggtgccctttcactcccaggccaagccctggagcaatcttcttcaggcagctgtctccacctccaggatgtccagcaggctgcaaggagaaggatgccagccacccatcctcccccagttcccagcctttcccctgttggtcacagccgcttctgtctttttccggtctactgtccccagtgtagagggctttgctgtccctgagactgaggcaggttccttttccaggtcagaggtggaggtagatctttctctcaaccacatctgcctccacacacagctcctccgcagggaaggagaagctgctctgtaactcattctggctatcgtcccccttctcactgacctgaccgcccaccacctccttccccctcatcacatgacaaaggataatgtgcaagaaaagtatttttatgtatcataaatgtattttgaaacaaatgagaagaagaaaggtagaagggtttattttattaaatgagcctgacttagtgacagtgtgtgagcatttgcaatgtaagggcctcagcttccttggagaagccaccccaggtttccagacatagatgttgaattgtttgtggggggtgtgccaggccacgtctcgtgtgtccgtatgcaggcatgcctgtgtatactgtgtatgggcacactgtgggactagctgggacaattcctagagattcaactgcccaattctaaccaacattggcagcggctgaacttggcatttccttgctaactgccagatgtggccaacctttgtccatatgcaaaccactgaaaaatgatctggatttctatagcaaggcccttggggagggcactctcccatgcccttggcctcgctggccacattggccaatgagccagggctggagtctgagacctttggttgttctttaaggcacctcctgccactttctccctcagaggcacaaacactttgtgttccacgtcagtttgaggggacggtggggggatgatatgaatgtcacaggaggagacaccttctgtctttgtttcaaagaaagtgatgtgccatttgttaatatacaagagaaatattgaaaatatattgaaaagagcaattttaaattatttttggcttatgttgcaatatttattttcttgtattagaaaagattcctttgtagagaaaaaatgtatttttcattaacgcaaagacctatttctcctttttgtacattgtccatgtgcgcaacccttaacgagcaatagaatgtatggtcacctgggtgtggccagtgcccgctgtgccctgcatgattctgtgttgccgctgctgcatagttcccagccccatcctgtcctgctcactcatgggggcttccagaccccggccccaccagggcttgtgtcatagggagccctttgcactcctcgtgtgttggcaaacgcagttaataaagcaatgttttctgtgc

SEQ ID NO: 28766 - DNA, 4221 bp, Homo Sapiens
gtcggccgtcccctttaatttttaaatacacggtcccctcttttctctggggggggcaagcaagaaatcaaagaaggaggagacaagccgtcaattttctccaaaacaaaccccaccgggcaatttggtctcggggtagggggagacggggtgattgcaaattattccaggacgagatccagttctccagcgggaaaggggcaaaggaacgccgcgcgttggaagggccagggtacgcagctccccttgcagcgcccgcaggacccccgcaagctcgtgccggcgaaatcggagaccgccgatctgtcctcgttctctcctgcacgtctggctgcattcggaggaagacctggggcgcgagcgagcggcgacagcatgagcctgtgctgacctccgcgcggcgggccgagcccagggctttgtcgcggtacctgcgcccagcccgcgccgcaactctgtgcccagcttttgcaatcttttgttgcagcgctgaccgcaccaagttaaatgctcccttgcaatttttcttttttttgtttgtttgtttaatttttggagagctcgcgatcttggaaaagcctcagacgccatctacagttaaaacgtaggtaactgccctctcccgcaccccccccttacacgccccccaccctttccaccaaaaaaagggggtgcagcgcggattctggctgccgtgcgtcgccagccggtagacccgtgcttgtttcctttctctttttgtttggcttctaacgcgttgggactgagtcgccgccgtgagctccccgaagactgcacaaactaccgcgggctcctccgccccgtctgcgattcggaagccggcctgggggtcgcgtcgggagccctgcgctgcagctccgcaccttagcagcccgggtactcatccagatccacgccggggacacacacacagagtaactaaaagtgcggcgattctgcacatcgccgactgctttggggtaacaaaaagacccgagttgcctgccgaccgaggacccccgggagccgggctcggagcagacgaggtatccggcggcgcccatttgggggcttctaactctttctccacgcagcccctcttctgtcccctcccctctcgctcccttttaaaatcagtggcaccgaggcgcctgcagccgcactcgccagcgactcatctctccagcgggtttttttttgtttgtcgtgtgcgatcctcacactcatgaacatacacaggtctacccccatcacaatagcgagatatgggagatcgcggaacaaaacccaggatttcgaagagttgtcgtctataaggtccgcggagcccagccagagtttcagcccgaacctcggctccccgagcccgcccgagactccgaacttgtcgcattgcgtttcttgtatcgggaaatacttattgttggaacctctggagggagaccacgtttttcgtgccgtgcatctgcacagcggagaggagctggtgtgcaaggtgtttgatatcagctgctaccaggaatccctggcaccgtgcttttgcctgtctgctcatagtaacatcaaccaaatcactgaaattatcctgggtgagaccaaagcctatgtgttctttgagcgaagctatggggacatgcattccttcgtccgcacctgcaagaagctgagagaggaggaggcagccagactgttctaccagattgcctcggcagtggcccactgccatgacggggggctggtgctgcgggacctcaagctgcggaaattcatctttaaggacgaagagaggactcgggtcaagctggaaagcctggaagacgcctacattctgcggggagatgatgattccctctccgacaagcatggctgcccggcttacgtaagcccagagatcttgaacaccagtggcagctactcgggcaaagcagccgacgtgtggagcctgggggtgatgctgtacaccatgttggtggggcggtaccctttccatgacattgaacccagctccctcttcagcaagatccggcgtggccagttcaacattccagagactctgtcgcccaaggccaagtgcctcatccgaagcattctgcgtcgggagccctcagagcggctgacctcgcaggaaattctggaccatccttggttttctacagattttagcgtctcgaattcagcatatggtgctaaggaagtgtctgaccagctggtgccggacgtcaacatggaagagaacttggaccctttctttaactgagctcatgccccacggagacttagcaggttccaggagtgagcgagggcagcggaaaggagttcttccgggggacacgaattgcctggctgagtagcaagaaagacacactcttaagtttcttggttcagagcaggaaaaccttcaaggagctgactgaccacgtagcatgggggcaagaggcgtgggatggggattggggtgagatggatgggagcccgctggagcttgtcttccctaacatagcctgggagaccaccccttgccacttgggccacttccgcctaccccacttttcattttgttccaaaatagttgcagatcctgacagaatcaaaactctctgcctcaaacacacatcctggcatcgcactgttagcatttaacttcttgttaggattcagggaaggaacagttggccaagaattttttttcttttaaacaagccaaccacctagctggtaattaatgaggttcacttaaaaaaaaaattcggtgcacacagactgacatgaaacctgggtgctacagtaaaagaaaacaaaagtccagtttgtgtctcttaatcgctcacttcaactcatttcttctaaataaactatttaatatcctggtcaggaaatgacatgttaatgctttgctccctgaagggggaaaaaatctgtcctttaacaagctattctgttttgtgtcaattgggtccgtggcaaggaagctattaggaagtcaaacggtccaggatgcattacctgctaatccttaggtttaaagggggaaagaaaagggaagaagaaaggaaaagagaaatccaactcctttttcatgttttgcttttgaacaatgagggtttgtgtgacaggcattcctctttgctgagatgatagcaatggcctgagattttagcaagctcctggagtctgatgcttttgcagtactctgatcgcaactaaacatttgtctttgttttattagaaactagtgaaacaaagcaggttgtcccacatgtataaaatacagggcagctatttagttttctttacagagaatgatccttttaaggcttgtaaggccctctggtttggacaaaaaccctcagtagagacaagcgggaaggataattagctgaaagctatgatgatataaataaaaacagctctctatcccaatacgcacctttgtattttcaagaactcttctatttattaaggaaaatgtcacattgtgatgtattaagccagtacttcaattacgggttgacttgggatgacatattacatgctgtagttaacatttataattctttttccttgtttgagtatttctgtctctgaaataaccttttacttggcttttctagatagctttatttgatttcgagtggcaaaatgttttttattacggcttttctattgctgtatgatacagaactcttttggcataaatatttgtgttcccagtacctcacttgttcggatttgactgcctgtatatgttttgtgaaatggtcctgtttttgggtaggtgacacgtggactctagtatgtaaatgttacttgaatctgtgcttcataatagtgtgtggcatgtatgtgcagactcttggatgctttatgcctgcgcaccaggagccctgtcctcacgttcccaggagggcggcttcacccttcgtaaccaggagacaaggcggccatggatttgcccttgattctattttgctaatggaagatagaaaggagagaaggtttttttttttttttaacattctgaagatggtgctgtgtcaagaaggaccttttttttcccctctcccctattttttaagtaccttggaggaggagaggttggtgacatgcatggtggggatctatggcctctggtgctttgtcctgtatttggtttaatgtttttgtcctaatctcttcaatcaataaaattgtgcgtatttaactaaaaaaaaaaaaaaaaaa

SEQ ID NO: 28767 - DNA, 6465 bp, Homo Sapiens
ggccgcgtcttctgcgtcacgaacagccagtccattgaagacttgaacaagtgggccctatttcttgtgtctccttttatacttgaagcagaacacatagcatttgtgacggagagcatttgggtacaaagtgagaatttacagagatcatcctcttcagaaacaacggagtgtcgttctgtcgtccaggctggagtgcagtggtgtggtctcggctcaccacaacctctgcctactgggttccagtgattctcctgcctcagcatcccgagtagctgggactacaggtgcacgctaccatgcccggctaatttttgtatttttagtagaggcgggggtttcaccatgccatccaggctggtttcgaactcctgacctcgtgatccacctgtctcggcctcccaaagtgctgggattacaggtgtgagccaccgcgcctggccctgtattttcaaattctttacctctgcgtttccagccttgctccatccaatttgttactagagctttttaacaatttcacgttgaattaagatgatttggaagaggagaaacaagagtcagaaaaattagcagcatccgtgatctgactctgggtaccagtgggttgttgagatttctgttccccactcactgcagagctgctgcctgccaatgccccctgttgggcagggccacctgtgctagtttaacctggggtctttcactcccggactgcttcttggatgtgagttttaagttgagcagagaagatatgccttgcctgctgccatacattgtaacatcaagtcaagagctttagttacttaacagatttctgctggctgctattataggaggaaactcctttgtttagggacagccagggcttccttagctttgatctttgggagtgagccttttgcttgacttcccttctcttttccatgcctttgtttccatctcgaagtgcaaatttaaagtgtcctgtttgcctttatccactggaaggcaaacaccctggacgacgtatcagtgacagcgcggttctgctttgatcggagcacccagcgctgcttgaaggcgtttgcatggtccatggctcatggaccacgctcctagaaaacggaaatgcacttagattgtcaagtggtcagactgttgtttgccattagcttgcagacctggggatccttatcggctaattgctgaagcaagtgtggacaacttcagcaagctgggggtggcgttcatggaagatagactccacatggataatggactggtaccccaaaagattgtgtcggtgcacttgcaggactccactctgaaggaagttaaggatcaggtctcaaacaagcaagcccagatcctagagccgaagcctgaaccttctcttgagattaagcctgagcaggacggtatggagcatgttggcagagatgacccaaaggctcttggtgaagaacccaaacaaaggagaggcagtgcctctgggagtgagcctgctggggacagtgacaggggagggggccccgttgagcattatcacctccatctgtctagttgccacgagtgtctggaacttgagaacagcaccattgagtcagtcaagtttgcgtctgccgagaacattccagaccttccctacgattatagcagcagtttggagagtgttgctgatgagacctcccccgaaagagaagggaggagagtcaacctcacgggaaaggcacccaacatcctcctctatgtgggctccgactcccaggaagccctcggccggttccacgaggtccggtctgtgctggccgactgtgtggacattgacagttatattctctaccacctgctggaggacagtgctctcagagacccgtggacggacaactgtctgctgttggtcattgctaccagggagtccattcccgaagacctgtaccagaagttcatggcctatctttctcagggagggaaggtgttgggcctgtcttcatccttcacctttggtggctttcaggtgacaagcaagggtgcactgcacaagacagtccagaacttggttttctccaaggctgaccagagcgaggtgaagctcagcgtcttgagcagtggctgcaggtaccaggaaggccccgtccggctcagccccggcaggctccagggccacctggagaatgaggacaaggacaggatgattgtgcatgtgccttttggaactcgcgggggagaagctgttctttgccaggtgcacttagaactacctcccagctccaacatagtgcaaactccagaagattttaacttgctcaagtcaagcaattttagaagatacgaagtccttagagagattctgacaacccttggcctcagctgtgacatgaaacaagttcctgccttaactcctctttacttgctgtcagctgcggaggaaatcagggatcctcttatgcagtggcttgggaaacatgtggactccgagggagaaataaaatccggccagctctctcttagatttgtttcatcctacgtgtctgaagtagaaataaccccatcttgtatacctgtggtgaccaacatggaggccttctcatcagaacatttcaacttagagatctatcgccaaaatctgcagaccaagcagttggggaaagtaattttgtttgccgaagtgacccccacaacgatgcgtctcctggatgggctgatgtttcagacaccgcaggaaatgggcttaatagtgatcgcggcccggcagaccgagggcaaaggacggggagggaatgtgtggctgagccctgtgggatgtgctctttctactctgctcatctccattccactgagatcccagctgggacagaggatcccgtttgtccagcatctgatgtccgtggctgtcgtggaagcagtgaggtccattcccaagtatcaggatatcaacttacgagtgaagtggcccaacgatatttattacagtgacctcatgaagatcggcggagttctggttaactcaacactcatgggagaaacattttatatacttattggctgtggatttaatgtgactaacagtaaccctaccatctgcatcaacgacctcatcacagaatacaataaacaacacaaggcagaactgaagcccttaagagccgattatctcatcgccagagtcgtgactgtgctggagaaactgatcaaagagtttcaggacaaagggcccaacagcgtccttcccctttattaccgatactgggtccacagtggtcagcaagtccatctgggcagcgcagagggaccaaaggtgtccatcgttggcctggacgattctggcttcctccaggttcaccaggagggcggcgaggttgtgactgtgcacccggacggcaactccttcgacatgctgagaaacctcatcctccccaaacggcggtaatgccgggcgtccccgagacgcggctgcctgtccgtgcccatgcatctggaaatctaatttagagttgtaggtgaattttcttttcctccaattcatttgttaagtctttgttctttttctgtgtttctgtttgtttttaggtttgttttgttgtcgttttctttggtgtttgaagaggctctgggatagatggttaagaagtagaaaatttagtttagggaaagccctcccacaggtgggaaattgctctcccctctgtggcttggacttacgtttattgtcaaggggagtttttacatggaaatgacaatgggaaaattcagatattttcttagtagtgcagacctttacccctagtctatgaaaaaacaaaccaaaatatgctcttgcgcccaggccagtggtgagttagaggtatgctatcactgtttgtaagcatctggggaggtactgaactgtaagaacatgcttggacacttagtcattgttctgtgtttttattaatgaagaaaagggaagacagacttccaagagttactgtccacccggtggtgtggccccatagcgaagtctaaatgcctgtagagatagagctagctggtgtggttgcagtgaccttgtagaggaaatcagttcattactttgacatcattcagtgagctctcctttcctaaggaagtttaaatgtccttagttagggactgactttcttaagtaagtttaaatttactacatattgtgaagagacaggatcaagttcagaatccttaaatgtctgattaggcatcacttggatgaggaggtgggcgatttggctctgacagctggagatgaaggcacactcataccacatacaagggaggatttggagcttttaagccagtttcagatttactctgaaatgtggagcattcctgcaagactgtgcagctcacggaatatagaagacatggcattttactcagaagtcataagtttttgcccccctcatttacctcgtattaccaagaaagaaaatgttatcgatactaaacaccatcagttcagagggaggatgtgtgtgtgtgcccgcatatgtgtgtgcgtgcgtgtgtgcgcacatagctttaaaagaagacattcaaaatttgatgtgctacaagcctcatgaaagaacaaaagaaatgaagccttttgatatgcattcgctattcccagatgtacgccatgccttttccatgtccctcctatctctgttgaacttatgaatcatactcattacttttcagctttttaaaaggccaatttttgtccagttttctctcttccagtcccagctgaaattagtggaaagaaagtttgatggagctttcagctttgaacaaaatcccttcattgtaaactagcaccatctttatccaggtcttacccagtcaggctaattccagaaacttgtggtttttagtatagtctgtctacctttagccaggcacaggacagccctatgaaaaaatacccaatatatattttttggaaatgaaacattaaaagaacttaaaaagtaatttttggaaatgaggcttcaattagaattatttttctcaaaaaacaaacaaacaaaaaacacaaaaaaaaccactcttctccaaatgcccaagccttctttcaaaattagttagaaacttaagtaaaatacaagtccacaccatccccaaattacaaaatggacttacccttgagagggcatctgcagaatatcatcagggacaaagatctcgaggctaacgatgtaggtttcatttctcagactttgtaatataaggcaagccctctctcagagctgccatcatcactttttgaatttctttgggggttatttaatgaaaaacatgctatgttttgttttaagctgaagtcctattctggacactctgctttgggaaaaaatgttatcatttaatttcctttctgcaaattaaaactaatgaagtgtggccttgtcaaaggctatggagatgttccgggcatactgctgtgctctgtgctttccagcaggcgctcctccctcacgcaggagactcagttgtcctgagagagatgaagcagccttgaagcagatgctgcgttttccataaacctgattttgcctcacatgaaccaaagactctcaaaactccgcttctatagaattagctgaataaaggcattttactgatagctgttcgtgttagcgaaacctgtctacctgctatagcacactctccgatttgggccatttatgcaccccgcaacctgggatctcaaggagctttaaagtcttaatgggaacttggcattttcctgatgatctttaaaatgtggtcactaaactcaggattggcgtgtgcttttagaacactggagtagcccttgttttagaggctgtgcattgagtatcgaccgtattttgtaaaaggcaagatatcctcccttccaggctggtaacgggtttcaaggggactcttgaggaagtgccccctaaaatagaacacagcaataactgggcttcctgtccccacccccaccccagcagtgctctctggcactgggaactctgctagggagtggtggaagtaggaaggatttgtgtgcaaaggaaaatcgtggttgagtttcactgcagcaggctgacgttgcctgatgtgagagcaagtggccgactggggtgcgggtgcacaggtcgggggagcacaggccacagagcgcagctctgggggtcccccaaggcacagcatatacagcatggtcgccccttgccctggagtctgggaacaaagagaggagccagcctccccgcactgcttcagatggaaaagggaggcagggtgggcttccgttctccagatctgtttgctcttaacaggcagaacatgggagaatccttattcctggttaatcactatgcatatttgaaataaaagaaagcgtaagcctctgcaattttaacttctcaaaggatgtctctgaaaagaatcactttaaaccaatgcctataaaaagcaagtctaccaaaataaactaagactttctatgtg

SEQ ID NO: 28768 - DNA, 6296 bp, Homo Sapiens
cactgggagagtttatgtggccgaggcagacaagtggaattaggccttgctgcaggggacttcatttccttctcagtactggacccatttatgaggaggtggcttatgaaagtgtgatgttcgcgtatttcttgacaggcagtggcgtgatcttggctcactgcaacctccgactccctggttcaagcgattctcctgcctcagcctcctgagtggggattacaggccacagcaaacacaggtgtgcaggaaccgtttgtcatggaagccagggagcctgggaggcccacacccacctaccatcttgtccctaacaccagccagtcccaggtggaagaagatgtcagctcgccacctcaaaggtcctccgaaactatgcagctgaagaaggagatctccctgctgaatggggtcagcctggtggtgggcaacatgatcggctcagggatctttgtctcacccaagggtgtgctggtacacactgcctcctatgggatgtcactgattgtgtgggccattggtgggctcttctctgttgtgggtgccctttgttatgcagagctggggaccaccatcaccaagtcgggagccagctacgcttatattctagaggcctttgggggcttcattgccttcatccgcctgtgggtctcactgctagttgttgagcccaccggtcaggccatcatcgccatcacctttgccaactacatcatccagccgtccttccccagctgtgatcccccatacctggcctgccgtctcctggctgctgcttgcatatgtctgctgacatttgtgaactgtgcctatgtcaagtggggcacacgtgtgcaggacacgttcacttacgccaaggtcgtagcgctcattgccatcattgtcatgggccttgttaaactgtgccagggacactctgagcactttcaggacgcctttgagggttcctcctgggacatgggaaacctctctcttgccctctactctgccctcttctcttactcaggttgggacacccttaattttgtaacagaagaaatcaaaaacccagaaagaaatttgcccttggccattgggatttctatgccaattgtgacgctcatctacatcctgaccaatgtggcctattacacagtgctgaacatttcagatgtccttagcagtgatgctgtggctgtgacatttgctgaccagacgtttggcatgttcagctggaccatccccattgctgttgccctgtcctgctttgggggcctcaatgcatccatctttgcttcatcaaggttgttcttcgtgggctcccgggagggccacctaccggaccttctgtccatgatccacattgagcgttttacacctatccctgctttactgttcaattgcaccatggcactcatctacctcatcgtggaggatgttttccagcttatcaactacttcagcttcagctactggttcttcgtgggcctgtctgttgttggacagctctacctccgctggaaggagcccaagcggccccggcctctcaagctgagcgtgtttttccccatcgtgttctgcatatgctccgtgtttctggtgatagtgcccctcttcactgacaccattaattccctcattggcatcgggattgccctttctggagtccctttctacttcatgggtgtttacctgccagagtcccggaggccattgtttattcggaatgtcctggctgctatcaccagaggcacccagcagctttgcttttgtgtcctgactgagcttgatgtagccgaagaaaaaaaggatgagaggaaaactgactagaggtcagaggtggctttctgaggcctggaaggcaggccaaccagcaaaatcctgataacaagactctgtgggcccaactctcctgaattaaaggagccttttgacccaatcatatagtggggctcagggccagtgctcactcttattggtaagctataggagactcaggatctgggccaacctcaaggtgggggcttcagagggtggggggaagattggggaacggggggaatggtcatttagttttactcctgataggtagatgcagctcttacagatatttacttggtaaagtgcagtggggaagagggaatgctaggttgatagggctggtggcttctgaatttggtatttgaactaggagtccctatagaggggctgctttatgggaagtttttctctgaccaggtacaacacctgactttaaaggcctgaaatgctaccatttcttcctctggctcaaaattcttccctggggagagagttatattcccttatttattgatatttagtccagaacaccagttctaacgaagcatgcgtgtctcttcatctacaggatgcaataggctgattgtatttaaaaatcaaagtacccaaaactgagtccctttgggctcagaaatgtctgtggtattgggtcagactctgaccacagattttatgctgtttagcacaatttctattgagtcttacctgcaacaatgaaccttaaagatttttttactcacgtacctgttacactttagcatacagatagatcatagatcacgttacaagcacttggctcaggtccagcaaggacagatgaacaaattcctgagtcagaagtctgttaatattgctgttttgaaggacaatcctttattttacttgagaccttacatctttgttctagctgacagtaaatctctgggtttctgttacgaactctaagagggctgaaacttctgatattcaggtggatcacctgaattctctcagctgtcaatggcttggagaacatctcatgggcccaagtcatcaaataacctgttcctctctgtaagggcagtgtgagggactgctgtgcagacccaagcaatcccaacctggtgctaggtcatttcacttttctgaaaacctcacatcaggctgcatcctcttctgtccctggcaccaggctttgtttacacttggagccaccttggtgtgggtcaccgggacagtgtactcctctcctgccagcctccccttccccgaggtgtggtggctgcagtctcaggaagagcttggtacttgtggggacttctgttttctccctgtggagatcagtgaagactgggaggaaagctgcttcaacctgagtccggctcttcagcaggctgcacaagtggaagcaactaattctggtgctcaggctgggctctccacccaagttaggcctgctctggcctaatggatcttactgtatgagcaggacggctgcattggattgtacaactgttttgtgatgcccccagacactgtcatcctaggccgagaagaacctgctagcttgacataccccatgggcttatccttaggttttggaattggtcaacagtgaggcagtctcccttcctgaccattcttctccacccagtcacagataagggaataaccttggccatatatttgctcaataaagattgaaggaagcatggtcatagttgccctgggttcagagcataatgcatatgtgaagcatggggtgacattcctactgtcatgggtttgggatttgtaacggcaaattcctgcccgacgacagggtgtcttatgcaaaggctgacttgcctgaacgctaagaacatgacttctgtctgagctaagctggcacccatcccagggctcctctggagctaatcctttaagcaaaatgtgcttgccttttaaagatccctgaccccagctttagctttctccaccagataaccagctaatcccaggaatttgctgccccccaccagtggcttctagggaaagcaaggacctcacatgccaggtgccctagtacttgcttagtgagccatgtcatcctcctttcatttttggatggtgacagcatttttcccctctgtgctggatacagacttctcccaggatcctctctttgggagcgaagccagaggatccctacagcactcaagcttcatggtggaattaatttctgccagctctttgttgtctgtctccttaaatccttttcctggtgtgcttattatcccttttgcagtgagtacagtttattaagttgtcagccctttaatattggggaaacttaatgagtataaatagcagggagcacattgtaacagcacagtgttttgtttttttcacccggttgctgtatgagaatggctttcaatcctttgtttctatgcctacagacagaaagcaagatgtctaatattagacatacaagttgctgcctgttataacggtgaattatacctttgtgcatgcctaggatgtttgttgttttaattagctgcaatatatacggcctgtgtacacagaatttaatcacttcggcaggttgaacaactccatgtagataagagcaagtgtaggcaaaggtttagaaaatggacataaagtcaaagaatgatggcaggtaggatgaaggagagatacttaggaaatcctaaaagaggcggcaagaaggtacctccctgtgtaactcaccttcccccatgacagtaagagacactcacaggctatgagggtacacccctagctgaatgttctgtgttgtttccttagacctgtggtgtccgctgcaacagctactagccacgtgtagctaattacattaaaatgaaataaaattaaaagctcagtttctcagttgcgctaatcacatttcaagtgctcagcagccacccgtgtctactactacacagtgcagacacagaacatatcatcactgcagatagttctactggacaatgttacgctagaataaacaccaaggcagtcagttaaggcagctatggtttggaaaggcatacggacagagtctgcttagaagagatacaagttgttaataaaattgatcctgttgatagtagtttgtttttgtggtgggtgctgtgaagagtaaacattactcagtggaaagctaagttcagaaggtactttgtttttcctcccttgccttaagtccttggtatttataatcaatgctgaaccttctatttcactaccgctccctgttttagatattcagatttaaaaggttttcaaagaattactttcttccatgttcaaagctagattttactaaacacatgtatcacattcatatatattgtttcttggccccactgccaaaggaagtcagtcagtaatttcacaaccgttatcagagtttggaagcagaaatagctgttaactaaaatctcccactgctcagactactttctgccctaatggccattactatccagtctgtattgctacaagggacccactggtaccccttttagattctatcaaaaggaacagggttttcctagaggcaggcagcctggtggtatggcacagcagaagcttactgctaatgaaatgggaacctccccctcccttgtggtttcagcacagaacctgaatgccaggaaaaattcctgggccaagaagctaaagctaaagaaaccttccttttttcaacgtttttttttctttcaaactgtagggtcacttttgattgaggcaaaggggtcctactgtaagtggaaaagactcactcccctaacataagttttcactgtggtgggatggtgccgcccgatatgcttgatatgcttttccttccacatgttaagctaggaaacctaacaggatgtcagcagggcagttaactctggactcagagccctcaagggcatgtggcagaacctcatggacatcacaagaccatcagtctgaatccaggtcgtgggggctgtcatagccgaactccttctgcacatccagagggtacttgctccacatccgctgtctgctgctgcctctttcctcctcactcaggctgttgtagtcagcagagcctagaatgacatcccgggagtggattctaaatgtgattttcctaggctactgcaggagccccttctcttctcagaaaggtctgtttttgttcccgattgtaatgcaaaatccttgctcaataaataaaaaagaatatagaattcttttttttttaaagaaggaatcactttcctatcatctaaaccaagttccttcacactggagtattttgtcacttctcccctccgtggagtattttgtcacttctcccctccgtataggattttttgttgttgtaagagttgtagtcatattgtaaatatttttgtacctttctccttttaacgtgttattgacaaacctccccaaaagaatatgcaattgtttgattcatttctctgttatcagacaccaataaattctttttgttgggc

SEQ ID NO: 28769 - DNA, 4404 bp, Homo Sapiens
gtcgagcagcggcggcggcggcggcagtggcggtcccactggcaggcgggcaagaggggagtccgggcggcggccggcgtgggagccgggggaccaccatggtaaagaagcggaaaggccgcgtcgtgatcgactcggacacagaggacagcggcagcgacgagaacctggatcaggagctcttgtccctggcaaagcgaaagcgcagtgactctgaggagaaggagccgcctgtgagtcagcctgcagcctcgtcagactcggagacgtctgacagtgacgatgagtggacatttgggagcaataaaaataagaagaaaggaaaagccagaaaaatagagaagaaaggaaccatgaagaaacaggccaacaaaactgcctcctcaggcagttcagacaaagacagttcagctgagagctcagcccctgaggaaggtgaagtgtcagactctgacagcaacagctcctcttccagttcagattcagactcttcctcagaagatgaagagttccatgatggctatggagaagacctcatgggagatgaggaagacagggcccgtctggaacagatgacagagaaagagagagagcaagaactgttcaatcgcatagagaagagggaggtgttgaaaagaagatttgaaatcaagaaaaaactaaaaacagccaaaaagaaagaaaagaaagaaaagaagaaaaagcaagaagaggagcaagaaaagaaaaaactgacacagattcaagaatctcaggtaacatcccacaacaaggaacggcgttccaagcgggatgagaaactagacaagaaatctcaagccatggaggagctaaaagcagagcgagaaaaacgaaagaacagaacagctgagctccttgccaaaaaacagccattaaaaaccagtgaggtctactctgatgatgaagaggaggaagaggatgacaaatccagtgaaaagtcagaccgctcatcacgaacatcatcgtctgatgaagaagaggagaaagaagagatccctcccaaatcccaaccagtttccttacctgaagaattgaatcgggttcgattatcacggcataagctagaacgctggtgtcacatgcccttctttgctaaaactgtcacaggatgttttgtgcggattggcatcggaaaccacaacagcaaaccagtttaccgggtcgctgagattacgggtgttgtggaaactgccaaagtttaccaactaggtggcaccagaacaaacaaagggctgcaactacggcatggcaatgaccaacgcgtgttccgtttagagtttgtctcaaaccaagaattcaccgaaagtgagtttatgaagtggaaagaagcgatgttctctgctggcatgcagttgcccactctagatgaaatcaataaaaaggaattatctattaaagaagctcttaattataaattcaatgatcaggacattgaagagattgtaaaagagaaagaaaggttcagaaaagctccacccaactacgctatgaagaagactcagctactgaaggaaaaggccatggctgaggacctgggggatcaggacaaggccaaacaaatccaagatcaactgaatgagctggaggaacgggcagaggccctggaccgccagcggaccaagaacatatccgctatcagttacatcaaccagcggaaccgggagtggaacattgtagagtctgagaaggcccttgtggctgaaagtcacaacatgaaaaaccaacagatggatccctttactcggcggcagtgcaagcctaccatcgtttctaattccagagacccagctgttcaagctgccatcttggcccagctgaatgcaaaatacggttctggagtgttaccagatgctccaaaggaaatgagcaagggtcaaggcaaagataaagatttgaattctaagtcagccagtgacctctcagaagatctgttcaaagtacacgattttgatgtgaagattgacttacaagttcccagctcagagtcaaaggctttagccatcacctccaaggctccgccagccaaggatggggctccaaggagatctctgaacttggaagactacaaaaaacgacgagggcttatttgagcacacccagcctgctgcttctgaccctgcatgccccatcgcagcgtcccacctttcctcctttcctttgatttagcctctttgggctggagcagctgttgaactgggaagagactctaaactgccagtcatctgtaatataaaccatttgctgtatagacctcctttgtctgcacaccatctcccaccagcctcccctcccccagggccccacccagtgtgggcctgggctctcttgggctttatccatgtctttagatttgtgtttgccttttgtttttttaaccgcgcagttcattggccactctgcacgcattcagtattaccatggagctgggaatcttgctggagcccctggggcaatagcagcagcaccaggcggtctcctctacagactgccttggcccacccattgaacattcggcacgtgaccttgtggggggagcggggattgggcacctgcgatcctctttcctctcttcatctttctcttctgcccttctttttggaagaaggggtttcaaaaccagtttagtttccaaaaagtgtacatttgtggggggggggggtctaatttgagagcgagagtgtgtatgtgtgtgtgtgtaagtgtgtggatttttttatcatttttttaaaatgcagtactctttgtatcagtctgtcatgggtctatagctgtttcagatttttttcagctgtacttgagcatctgaaactgcaagaaagaaactcattaaatgtgattcttcttactaaacaggcctgactgctgtagctgtgtaacttccccattcccacctactcttcccatcctttcccaactttggagaaaactccccagtttagccccctgacctgcaggctgtgtcctggcaggtgtgggagggaagcccatggccaggtaccagggagggcagtgaatgtcttgctcttcccatgggtacagcccacagcttcttggctgaacgtagaacttctttttctcacccagtataccagcctcttcctggtgattctgttttgctgctttggcaagaactacattttgtttttaagagaaatttctgaatatgaatgtggagagcaaacacaaaaagatttaggttacgccgggtgcagtagctcacgcctgtaatcccagcactttgggaggcctaggcgggtggatcacctgaggtcaggagttcaagaccaatctgactaacacggtgaaaccccatctctactaaaactacaaaacttagccgggcatggtggtgcgtgcctgtaatcccagctactcggggggctgagacaggagaatcccttgaacctgggaggcggaggttgtggtgagccaagatcgtgccactgcactccagtctgggtgacagagtgagactccgcctcaaaaagatttaggttgcaaatgtttcaagcatgtgcagttttgtgtgtgtgtatacatatatatggtcagcatatatattgtgcagctagggcgaagccagcagaggtgtgtgtatgtctttatgaaatgtttgaaaagagataagctgactgcttgataatcactctcaggtgtaaagctccaagtgtaaataaaagtggcatttaacaaatctttcagaacaaagtacagctgactatatataccaagagctaagctaaaggaacagctgagagctccgatctccacgagagactaatctaaaagctctgctttgtacttcctcaccctgctttcgtacaaggaagggggacgatgggaaatcatggacttgtaagttgtatttaaacataaaaatgaacttggtaacttctgggtttagtagagcctcagtgtcgctttaacttagtttactttttttttatttttaaagcagcaatggatggttttaaaggagtattatgattgtaaaattgctaaatatgactgtaacacagctttgtggtagctgtgacacagttcacttgggcaaaggagtggtgatggactcgttaaaatcatatatacttgaatagtccattgaccgaaactctttatagactattgtgtaaatgtggaatcacagactgttaacattgcctggacttcagcagagtcctggagctgctgggacctctcctatcatgatgaacttggacttttttttttgatttctggttttaaaaaacataaaattatagaatccagataattcgctggagtcattctgatccaccatgtagatctgtatttagtatcatttggatttggagaagtgttgattacattatggctgtgtaataaaatttttattaaaactgc

SEQ ID NO: 28770 - DNA, 6178 bp, Homo Sapiens
tggagggctactacagaccgagacaacacttggactcagttcatatcagcagaaaagtatatctctctaccgggggaattgcaggcccatacgatttgagccaccaatgctggatttccatgaacaaccagttggaatgccaaaaatggaaaaagtctacttacataatcctagttctgaagaaacgattactttagtatcaatatctgctacaacatcacattttcatgcatcattttttcaaaataggaaaattcttccaggaggaaatacatcatttgatgtagtttttcttgcaagagtagtaggaaatgtagaaaatactttatttattaatacatctaatcatggggtatttacttaccaggtatttggtgttggagttccaaatccatatcgattgaggccgttccttggggccagagtccctgtgaatagcagtttctcacctataataaacatccacaatcctcacagtgagcctttacaggttgtagaaatgtactctagtggaggagaccttcacctagaactcccaacgggtcaacaaggaggtaccagaaaactgtgggaaattcctccttatgaaaccaagggagtgatgagagccagtttttcatctagagaagcagataatcacacagccttcataagaataaagactaatgcttcagacagcacagagtttatcattcttcctgttgaggttgaagttacaacagctcctggaatttattcctcaactgaaatgttagattttggtacactaagaacacaagatctaccaaaagttttaaaccttcatttattaaattcaggaacaaaagatgtaccaataacaagtgttcgacctacaccacaaaatgatgctataacggtacactttaaaccaattacattaaaagcatcagaaagtaaatacaccaaggttgcaagcattagttttgatgcatcgaaggcaaaaaagccatctcagttttctgggaaaataacagttaaagcaaaggaaaagagttattctaaacttgaaataccatatcaagcagaagttttagatggttatttgggatttgatcatgctgcaacattatttcacatccgagacagccctgctgatcctgtggaaaggccaatttaccttactaacactttcagttttgcgatcctcattcacgatgtgttgctaccagaagaagccaaaacaatgtttaaagttcacaacttcagcaaaccagtcttaattcttcctaatgaatcaggatacatttttaccctgctttttatgccttccacatcatccatgcacattgataacaacattttacttattaccaatgcttctaaatttcatttacccgtgcgggtatacacaggctttttagattactttgtattgccccccaaaatagaggaacgtttcatagattttggagtactgagtgctacagaagcaagtaatattttatttgcaattataaacagcaatccaattgagttggctataaaaagttggcatatcataggagacggtttatcaatagaacttgtagctgtggaaagaggcaatagaactacaataatttcaagcctgccagagtttgaaaaatcctctttatcagatcaatcatcggtaacattagcttcaggctattttgcagtcttcagagtcaaacttactgcaaaaaaattagaggggattcatgatggagccatccagatcacaacagactatgagatcctgacaatccctgtgaaggctgtgattgcagtaggctcactgacctgcttccctaagcacgtggttcttccaccttcctttccagggaaaatagttcatcaaagtttaaatattatgaattccttctcacagaaggtaaaaatacagcaaatacgatctttgtcagaagatgtgcgattttactataaacgattacggggcaataaggaagacttggagccaggaaaaaaatcaaagattgcaaacatttattttgatcctggactacagtgtggggatcattgctatgttggcttgccttttctatccaaatctgaacccaaagtgcagcctggtgtagccatgcaggaagatatgtgggatgctgactgggatttgcatcaaagcctgttcaagggatggacaggaataaaggaaaattcaggtcatagattgagtgctatatttgaagtaaatacagaccttcaaaaaaatataatatcaaaaatcactgctgagctctcctggccttccatacttagctcaccccggcacttgaaatttccacttactaatacaaactgctcctcagaagaagagattactttagaaaatcctgcagatgttcctgtctatgttcagtttattcctctggctttatattccaacccttcagtgtttgtagataagttagtatcaaggtttaacttgagtaaggtggcaaagatagatttgagaacactagaatttcaagtcttcagaaacagtgctcatccactgcagagttcaacaggatttatggagggcctctctcgacatttaattttaaacctaattttaaaacctggagaaaagaaatctgtcaaagtaaagtttactccagttcacaacagaactgtttcttcacttatcatagtcagaaataacctgactgtgatggatgctgtgatggtccaaggacaaggaacaactgagaacttgagggtggcaggcaagcttccaggtccaggaagctccttacgctttaaaatcacggaagcattgttaaaagattgtacagatagtttaaaactaagagaaccaaatttcacattgaaaagaacatttaaggtagagaatacaggacaacttcaaattcacatagaaaccattgaaatcagtggatactcatgtgaaggatatggctttaaagttgttaattgtcaagagtttactctaagtgccaatgcttctagagatataatcatattgtttactcctgattttacagcttctagagttattcgggaactgaagtttataacaaccagtggctctgagtttgtatttatattgaatgcatcccttccttaccatatgttagcaacctgtgcagaagccctacccagacctaactgggaactggctctgtatatcatcatctcaggaataatgagtgcactgtttcttttggtcattggaacagcctatttggaagctcaaggaatatgggagccatttcgaaggcggctatcctttgaggcctcgaacccgcccttcgatgtgggaaggccatttgatctcaggagaatcgttggtatttcatctgaaggaaacttgaacacactcagctgtgaccccggtcacagtagggggttctgtggagcaggcggttcatcatcccgacccagtgccgggagtcataagcagtgtggcccatcggtccacccacacagcagtcacagcaatagaaactcagctgacgtggaaaacgtcagagccaaaaacagttcaagtacctctagtaggacttctgctcaagcagcttcttcacagtctgctaacaaaacaagcccccttgtcttagattcgaacacagtgactcaaggtcatacagcgggcagaaagtccaaaggggcaaagcagagccagcacggcagccagcaccatgcccacagcccgctggagcagcaccctcagcctcctctgccaccgccagtgcctcagccccaggagccgcagcctgaaaggctgtctcccgcccccctcgcacacccttcccacccagaacgtgccagcagcgcgaggcacagttccgaggactcggacatcaccagtctcatagaagccatggacaaagactttgaccaccatgactccccagccctagaagtgtttacagagcagcctccatcgccattgccaaaaagcaaagggaaaggaaaacctcttcagcgcaaggtgaaaccacctaagaagcaagaggaaaaggagaagaagggaaagggaaagccacaggaagatgagctgaaggactctttggctgatgatgatagctcctccaccaccacagagacctccaaccctgacacagaaccgctcctcaaggaggatacagaaaagcaaaagggaaaacaagccatgcctgaaaaacatgaaagtgaaatgtctcaagtgaagcaaaaaagcaaaaaactcttaaatattaagaaagaaatcccaacagatgtgaaacccagttcattagaactaccatatactccccctttggaaagtaagcaacgtagaaatctcccaagcaagattcctcttccaactgcaatgacaagtggatccaaatcacgaaatgcccagaaaacaaaaggtacaagtaagttagtggataacagaccacctgccctagcaaaattcctcccgaatagtcaagaattaggcaacaccagtagctcagagggtgaaaaagactctcctccaccggagtgggattccgttccagttcacaaacctggcagctctactgatagtctttataaactttctctgcaaaccctcaacgcagacattttcttaaaacaacgccagacctcaccgacacctgcttccccgtctcccccagctgccccctgcccctttgtggcccggggcagctacagcagcatcgtcaacagcagctccagcagtgaccctaaaataaaacagccaaatggaagcaaacacaagttgacaaaggcagcctcgctcccgggcaagaacggcaaccccacttttgctgcagtcacggctggctacgacaagagcccaggtgggaatggctttgctaaagtttcttcaaacaaaacaggtttctccagcagccttggcatttcacacgctcctgttgacagcgatggctcagacagctcgggtttgtggagtcccgtcagcaacccaagcagccctgacttcactcccctcaattcgttctccgcctttggaaactcttttaatctaactggtgaagttttcagcaaactcggattatctcgatcgtgcaatcaggcctcacagaggagctggaacgagtttaatagtggcccttcatacctttgggagtcgccagcgacagatcccagtccttcctggccagccagttccggctccccgacccacacagccacatcggtcctcggtaacaccagcggcctgtggtccaccactccattcagcagctccatttggtccagcaaccttagcagcgcccttcccttcaccactccagcaaacacgctggcaagcatcggcctcatgggcacagaaaactcccctgctcctcacgctccctccacctccagtccagctgacgacttgggacagacctacaacccgtggcggatatggagccccacgattggaagaagaagctcggacccttggtctaattcgcactttcctcacgagaattaaattaagcaaaaaacaaacaaacatagtgggccctcgtctagatcatgatgtgccagtttctgagacatctttttaaggctcttactgcagctcccctccccaccctcctcttctttgcaaaacagacccaagcagggcaggctcagaccactcgcttctttcagatctttcttgcaattatgataacatgagatttgctgttgtgcttttagagaaaagtctggactcagccacaaactctaataagacctgtacatctgagaacctttcccgttactgcgttttcaccacctgtcttccccatgctttatttatctgtatgaacacagatttgacattacagctaaggaaataatttgagttgattcagaaatcctggcatgtgacaattttgttaaattaccaagtttggtttttaataatttctcaatattatgcgccaagatctaattttaaaactgtatgaggactttgtgctgaaaatagagtatttttttaaagtaaggctgtcttggtttaaaagcagattacagaaatgtaagtcaacttaagaacggtgaatgaatgtaaaaacattcagttgagaccatatgcattttctgtgctgtttgtacttgaggtatgtaacatttgtatacctgaacttattttaaagatgaactgaaatgcacatagccaagtcttgagatacaagattgaatgtgtatttcttaaaaatacaactttgtgttgtactttgaaataaatgatgcttttttc

SEQ ID NO: 28771 - DNA, 6313 bp, Homo Sapiens
gccaggtccctgaggggcgggcagatgaggcctaggggtgccgatccctagtgtcgactatgcgagatctgattccggagctgccatgattgaagtggtagcagagctcagccggggtcctgtatttttggctggggaggcgctggagtgtgtagtgaccgtcaccaacccccttccgcccacggccacttctgcatccagtgaggccctggcctgggccagtgcccaaatccactgccagttccatgccagtgagagtcgagtagcactgcctcctcctgactctagtcagccagatgtccagcccgacagccagactgtctttctgccacaccgaggtgagaggggccagtgtatcctttctactccaccgaaaattctattctgtgacctgaggcttgatcctggagagtccaaatcatactcctacagtgaagtgctgcccatagagggaccaccctcctttcggggtcagtcagtcaagtacgtctacaaactgaccattggctgccagcgtgtcaactcccctatcactttactcagagtccctctgagggttcttgtgctgactggccttcaggatgtccggtttccccaggatgaggctgtagccccatccagtccattcttggaggaggatgaaggtgggaagaaagattcatggctagctgagctggctggggaacgcctaatggctgccacatcctgccgcagcctccatctatacaatatcagtgatggccgagggaaagttgggacgtttggcatcttcaaatctgtgtacagacttggcgaggacgtggtggggaccttaaacttaggggaaggaaccgtagcttgtttgcagttttcagtcagcttacagaccgaggagcgtgtacagcctgagtaccagcggcgacgtggggcagggggtgtcccctctgtgtcacatgtgactcacgcccggcaccaggaatcctgcctacatacaactagaaccagcttctccctcccaatccctctcagctccaccccaggcttctgtacagccattgtgtccttgaagtggagattgcattttgaatttgtaacgtcccgagaaccaggattggtactcctaccccctgtggaacagcccgaacctaccacctggacaggacctgagcaagtacctgtagacaccttcagctgggacctgcccatcaaggtgctgcctactagccccaccctggcctcatatgctgccccaggccccagcaccagcaccataaccatctgaaactggcccaccctggtgctagttccttccggatactgagaactcagcacctggactctaatgggacccactttttccacctggggtccaatgtcgtggacagtgagagtcgggctttcagctatagcattaatttatttgttcagaatacattggcagctgctagtggtttccctggaagtggcagcagcagtgagcagtcagcagatggatgatcagttgagtttagctggagtggggagcaggagccccaggaacaggggtgttggctgagccccattctgggtcaggccctccccctttgcagggcagccgagggtcagatttttgcaccaaggagaactggcaggttcctgcctcctgacgtacctcacacccagccgggaagtcgatgggatgctgggacctggggaaccaaggataggggaaggagtcagcacagtgaaaggctgcctttatccctgcccacatgttccctctctcacagttttccccccacagagcccctttcagtggccccttggtcctcctaactaagctgtcacctaccatatgtgggcctttttgttttataacaggagtattttctctccaggtccaccccaacctcccctgatttatagcctgaagccttatctttcacactagtgttggtcccttcaggtttggcccatcttgtattgctcttctgttcattcttacatcacagcaatctagtcactccctggtcatccctcagtcactcatatcagagtcattctctctggccatctttggtcactcacgtgtcacagcagcccacgccaacaggatgcagacaggtgcaatggaaacagtccttgcggagccaagactcacccagggtaaaatatttcccctcatagtgacagggggctagggaagaacgggaaatgttagtaggtgtaggagtgctgatgagaggcagaggctcttctggtctggggtggagacagtaagtacgcactatccccgtatttagtttgtctttcctgtttcacagctggaggaagcctgggtattttgacacgggatcatctgtaaggccccatcctccctgtgccctctctgctgctcctccattcctaacgcttcaccccactttaccttgagcttggaagtagcacttgctgtagactcctgggtgctggaggagtagagacatcaccaagcagatgatcccccagcctcctaggatccccttggcctgtccagcccagagcatccttagggccattgctgctgcacagccctctcagacccttcttggcctctgctcagctactctggtcttgactccttgactttgctttgcgttgctccttgagtcttagtttctgtctttctcccctgggctcctgtctcacactatctccctgccctctgctctcacaggctggggatgtttataaagtgaggaccctggccccctgctgagtagagctggaaaagttgtaactctgtttcctgaggtgagggcatgaaaacaagaggtctagctttaacaagctgtgagagctgattcatgccccggcacagctagagggagggaggtggccatggagggggcactggactgggcacttccccagcaaggaggcaggaggggcgagggcccccaggtggtccccagatctcttccctgacctggagagaaggaagcattccaccttccccctttctcccccactgccaccaccaggggtgtgtatgctgggatccctgcctggaccggagggaggcatttcctggggatggttaatcctgtgccccagccaaacccaggagctgcaatagggtgcgacggccagaagctccaggagagtgagcaggcacctggagtggagactgtgtttccctcagatcctagggcagggtttccctaatgtatccaagaaatagggctgcccctcagagatggtggggagggtctcttttcctcaggcattccagaggtgaactgtccattgcttatcaccttcaaacatacagcagatgtgggatcaccccacatctggggatggttctttcccctttcaaagaggagcatctctaagtgccctgatgggatgaatcactccaggttcacagaggtgtcctctctttcctcccatatataatggagtgaggtttttaggaatttatcatttggcatcctctgagtttcccacaggttctggaggagcccaggatggattattgagagcatgggctgtagagacagtcttcttggattcagatcctgactccacttagctatgtaacctggtcagattacttcacctctctgagcctgtttcctcatctataaattggggatagtaatgccaactcattgggctgttatgaggattactgagataatgcgtgcagtgctcttatcaccatctctggtgcgtaagcgtcaggaaatagcagttgctgtgattggggctaaagctctgaggcaaaatgggcgacattattttctttgaatgacattaagcagtttgtgcatagctgagggcttctattggggatggctgtctcctggcatagacctctgcacctttcacactcatactccttgtcagcagtccccaacctttttggtaccagggaccggttttgtggaaaacaatttttccaccagtggatggagggggatagcagcggggagatgattttgggatgaaactgtttcatctcagatcatcaggcattagattctcataaggagtgtgcaatctagatcccttgcatgcggagttcacagtggggtttgcactcctgtgagaatctaatgcctctgctgatctgccaggaggaggagctcaggcggtaatgctcactcgcctgccgcccacctcctgctttgtgctcccgcttcctaacaggccacagactggtactggcctgtggcctgggggatggagacccctaatccatgtcacctttcccacctctttcaaaaacaggtacctccaggaacattttggttttggcccttgtattgacttctgaatgtctagtttgagaaactgttcccaaataagccttcttcccccagatctgcaccctcgcctctaccctaggacaagatgtccttttctcatcatcctgccaggctaactttaagtctcctgctttttctcacttggatttggatccatttcttcctatttccgctcatgtgaactctccagttctcctttctcaccactctcctgctagccatctctttggcactaaaggccctggtcaaattggatttctttcatttttccacacttcaaagacccatgttctaggtattctccatagggatagtctctttggcatttatttggtttttctacgttttcagtcccatttactccaagactcactccctgccacctagtgcatcagatacagctacttctggctgacttttcaagggggaccaccctacctgtcatctcttcactgttcagaaatgactgtgtcagtgcacctcaaactcccttgctgtccttttccaaggagacagctaaggtggatggagatgcagaatggacctcacgttcgccctagtcaggactgataccctttccgtttcagaggattgccaagaaaaaactcacagttgaggcagggtgctctgaggtcggctgcggtgtgggaggcacggcctgggcctgctctctgggctggagcaggtggattcgaaggcctgtctagcacgagggcccaaaggtcttgtcagtggccagtagctctgccgcctttcccagagagggggtccaggggacatcctggaaggctgggccctgggccaccttctgctcttgcaagctagagccagcccaatagggggcggatgtgagtggggagctggggcgcatgaaggtgggggtgatgccgaaggggaagggatcgccagtggggattggtgcgtgtgcggaaacggggacagaagtgaaggttcatcgcctataacgaagatgaggtaggcatataggggcttctggaaagctagaggctgggctgagccaggagtcctctcccagaagttggggggcggtgcagaggtgtgggtcgagcccgcatgcgtgcctgctggggagggggtgagtggtgaggaccaggcccgctgggtcctgggggcgcggtggctggcgcgcaggtcccggagggggcggctggcgcgcactacacgcttgggaacaaggaaaacatccgccggaggcccggccgggcggcgctccagcctcggggcaggtgcgcggagaggaagtgagagcattccggcccccccaccccaaccccggccgctggccctctggtgagtcacagccgacccccgccgccggagggagaggggagctgcgggccagagccccggagggtctggaggagccaggagggtttctgggagcagagggtcacttagtgggcttctgtcgtggtgtcgctacgggcgcgaaacggacactgaacacagtctgactgtatggaggcaggtggggagggatcccctgggagaacttggcgggccgagagcagaccccagggcaaggaggggcccccgagggggaaaccgggagtcgggcaggtggcgtaacccagaaagggaaggagagccggattgattggggtgagagaggaaggaagcacgccaagttaggcctgggagaactgagggacctgaggagggaggagggagaccaacacagggtgggaaggcggaaatggccaaaccccaggcatcaggtctgtccagaggctgacgtagacagtgaagggtgaagggtaggttttaggagtagggggagttatgattatttggttacattttgggattatttggtctcacaggtagaagggagcctgctggtctctgtgtaacggatggcttaaaagcaaggttgtctgcgtcttggattactgtctgccattcagcctttgccaaaaaatttggcactgatctgcacatttttatagtcatttaaaattgtatgactctgtcaaatgatttaagtaattttggtggatttttaaaaataaaaaaat

SEQ ID NO: 28772 - DNA, 5918 bp, Homo Sapiens
ccaactcctggagtcccctgggagctgccgctgcaggcccccgagccgctaggccccgccgccaggccaccgctgctgcggcagccatggcggaagttcatagacgtcagcatgctcgggttaaaggagaagcccccgcgaaatcctccacactccgagatgaggaggagctggggatggcgtcggccgaaacgctgaccgtgtttctgaagctgctggccgccggcttttacggcgtgagctccttcctgatcgtggtggtgaataagagcgtgctcaccaattacagatttccctcctcactatgtgttggacttggccagatggtggccacagtggcagttctctgggtgggaaaggcgctcagagtagtcaagtttcctgaccttgacagaaatgtacctcgaaagacgtttccactacctctactatattttgggaaccaaatcacgggactgttcagcacaaagaaactgaacttgccaatgtttacagttctgagaaggttctccatcctgtttacaatgtttgctgaaggagttttactcaagaagactttttcttggggtattaaaatgactgtatttgcaatgattattggagcctttgtagctgccagctctgacttggcatttgatctggaaggatatgcttttattctgataaacgatgtcctaacagcagcaaatggtgcatacgtaaaacaaaaattagattcaaaagagctgggaaaatatggactgctctattacaatgcactgttcatgattctgcccaccctggccattgcgtatttcacaggagatgcacaaaaggctgtggagtttgaaggctgggctgacaccctctttcttctgcagttcaccctctcctgtgtgatggggtttatcttaatgtacgccacagtactctgcacgcagtataattctgctcttacaactacaatagttggctgtattaagaatatattaataacttatattggaatggtctttggtggagattatattttcacgtggacaaacttcattggtttaaatatcagcattgctgggagcctggtatattcctatatcactttcactgaagagcagctgagcaaacagtcagaggctaataacaagctggacattaaggggaaaggagcagtgtgaccagaggattgcttcatctgatacgtaggcctaagtttttaatcaactcagaacactggcagttcctacagagacactgaggtgtcttgattatggaggaaataaccattcctttgcacttgtacaatctgaggattgattgctgccttttaaaattttatgaagagagaaacttataattgactctattttaaatatgttgtttgaattaatttatatcagactggaaaaggtactgggctttttaatttatttttcttatatgccgacagtgaaacatcagtgttttgaaagtattttatttcataatttgatatccaggtgtccctgagagctgcatatgtaatgtttgccaactggagcttcatcattcaaattgttgctgcatctggaggcagtttagcctttcctctgctggaaatgcagacgaatatgtgaaatttctcttctttgaatcttatttcttatgattgcattgtcttcatcatatcatcattccatttgccaaggaaaacaactttggcactataaaaatatgtggggctttgaagtgtattgctatctatgttggcttccctgactttcataggatgagcagagtgcattccttgaaaacatgttctttttttgttgtgtagaatggggataatgaagggggtgagaaagtaggccttttactaatttttcatctatttgacttattgattcaactaaaatgttttaagtatatgtgccaggcattgtgctaaatgctggggatacagagatgtttgcagaggtagttgaaacatctcactcctgccatagtgactcaggtaaggttgagaatttagctctgttaatctattcagaagatgtcactaagagtaagttgtttcagcactcaaaagccgcaaatctgtaaattggattaagaacacctgccctacctacccggcaatagtgtgaatccaaatgctgcaatgtgagatgaggtacaagtaaagagctgtgttttgtaaaccagtgcagctcagcattgactccctctctaagtgaaaattgcagacaggcaagtctgttttcccttgccaccttcctttgggtttggttgctctttggatgaatatgatgaggtcccacatttctgaatttattggtttgaggggaaaggctggttagacgtctttgtattgtcaatggttggtttttctctggcagtgtcagtgttagagctatcatcttccttcttaaatggcatgagcaatgagcaaacttccctcctttcaacattctcacctacatcatgtgccccttggctcacctactgagcttgccaacttctctcaaaaccaatgctgcattttgggagagcagctgtgaatgggcactgcctaaattgcctcttggggtaatctggagggtggaggtgttaactcaaacataaccctatgacttgactcagagatatccattgactttgaggattagtgtgtttgctcaggccagttgtacagccagtgtgcaagagatttggtacctttgcactaatgcacacaccagtgtctatttcattgggtttggaatccactggactctgttgacctaaacagttagggttttgattttttttgatatgcaaatttatattgagatcattttcatattcctgtcttttggtttgtctttactaaagcttggctggtggtgctgtgtccctagaattatccctgcaaccaactcccaagttacaagcttcattaagagccttagactcacttttttctagcatcttctgacctgagaaaattccactgggagtaaaggatagtatcttgtgtcatatgggtcttactctccctattttaccaatgagaaaacaaaactcagagaaagatgacttgctaatacatcaaacccatgtcctttttattgaactatgctgccatttaattaaccgcccttcccctctgagggagtaaggaaacagatcctgagttcacttgagcactttcaaaaaagcaagcagttgattgaatttggtgtcagagaggagcatactttgcaaatcaggaagagtgacagcttaccctgtcctggaacccttatcccacttccaggctgactttagttgataatgcacttctggctgtaaatgttgccaacacttcctggttttgcttaggtacagtgaaagggcatagtgagagctatttttagtgattctgttctttctgtcagcaacatgaaggagggacgtttgaataatttttgttgtagaatatttcttcatgaaaggcttttgggtgtctttaacaggtgttgggctagagccccaccaggagttgaactgcctcttgggggtcaggttccctaggagatctgtcacctcttcaggagtatttgagaacattgtgtagttacagcttcactaaatgcacgtgacaggcttctgtgccttgggagccctggcttatgctgaaacttctggctgaccagagcagtacagcaactttgccctgtctgtgttctgcttcctggatgcatccttcagccactaaccagcattgcaagatggagcagggtgaacaagctggagactgaatagtcttttggagtttgcgttttgattattgcaggcgtgttacaatatactggtgatttacctggtactgtggcacctcccagaaagtctggtttttgccccatgtttgatatttactaggcagaaattctttgtcctgttaactgcctcctgggagaaaaagaggcaatacagagttaaatccttaatttgcccactgagacagatgagctgtggtattccaaaagacaaattctatgactagtgtctcctgttcaatgtaagtgagaccctctttggccaatctgcttctagtcaaggctaaatggattggaataaccctagttggccaggctacacattgccagcatgtcccgttgagttttaattgcctcatgtggctgtggactttatgagtcaatcatttgtaggctccagtttgcacctagtttttttttttaaaaagtgcatttacacgcttttggtagtcctgttttatcaagaatccatggagggttttggtcagtacagctggtgcaggatcctcacggagaaacagtggagtttcacattgagttggtttgaaatggcaccccaggactttgggcctgccttacttgatagcctcgttcagtgagcaaagacttagtgagcagctcttgtatgccaagtattttgctaagctctggaaaaaagataaacaagacatggttcttgctttcaaggagtgtgtaattctttagccagatatggaaacctggaccctgagtgggagaaaggagacagatgaaaggagtccgtgattttgtaaccaagagctgcctgcatggttatgagtatcactgattttagggacgccccacagagctaaagcatttttttaatccgagaggacttttgtaactcatattagttaatcttctagctctgagatagcaacacagctcttagaattctgtaagtagcttgaggcctcctcctctactgtacatgttcttgctttcccaaaattgtaagtttggtttttcctatgaacaagactgtaattgatttttctctccctgaggaaaaaagttcggaataaatgagacatggatatgaaactacttagcacaatgcctggtacatattaggccctcagcaaatgtggctaccgtgtcattatttcatggtgagactcaaggcaaaacaagattcttaatttatgctccgtaaatgctagaggcttgggcaatacggtctgtcctgaaaaacaggactctgtgtctcattgcctctagaatccttaggtagcagtttctgttcactgtcttttcttttttaaaaatatctgctggacacaattacggccattacatgatgcaggtgattctacctattttttaaaaagaacaaaatttcttttatattgtgacagtacattttaataaaggaaaattattttcttccccctactccccctccttttttttttctggtaaagacagggtctcactctgttgccagactggtctcaaactcctggcctcaagtaacccttctgtctcagcctcccaaagtgctgggattacaggtgtgtgccacatgtccggccaggaaaattattttctatcttaaagaaacatagttacattttagaatgtcaattcagttaaatctttctcagtttttacctttagatggctcctggaaaggccagcgttccttttcccctctctgaattgaaagcacttgaccccatgctgcccctgcttccaggcctgtctcagttgtcatatattgtgagtccctggcaccattactgttttctaagccagtcttctaggtcttactttcaggatgctgcttcatggcatgaggatatagtttacagtgttgtagtttttttttttttaaagctttgttctttaaaaatactttttaaaaagaaatctactggttagatttattgtctcacaaaaatgtttttagagattatttttttcacaaatgttttctttctcatgctgatgatcaactgatttttgtctacaggtgttagcttctcacagtattttttcattttagagtctatttaccaaatgaccatttttagtgttaaaaggtactgaggaattgaggtatgtaaatcaggtgacataaacatgaaaattatgtgcctaaatatttttgtaatggtgtaaaataaatactttttcctg

SEQ ID NO: 28773 - DNA, 4461 bp, Homo Sapiens
cttgttgttgatccgtacccagtgggcagcgccgggagctggaccaagcggccggtgagaggccgctgtagcggtgctcagccacctgtgctgcctgccagggggcgggccgaaacctggaggcccggggggcccagctcccgtagggagccgtgggcgctcggtgcccgggccgggcaggacagaataataagctgaatagaatctgaccattggctttcacctggccaggaccttctatgtagctctccttttgtggcccatgtgctgcatcctctgccctcagtgtgcaactggcccccaacgcaatgtgtgtttgtcaaaccatggaagtggggcagtatggcaagaatgcaagtcgggctggagaccggggagtcctcctggagcccttcatccaccaagtaggcggacacagcagcatgatgcgttacgacgatcacactgtgtgcaagcccctcatctcccgggaacagcgcttttacgagtccctccctcccgaaatgaaggagttcacccctgaatacaaaggcgtggtatctgtctgttttgagggggacagtgatggttacatcaacttagtggcctatccttatgtggaaagtgagactgtggaacaggatgacacaacagaacgggagcaacctcggcgcaaacactcccgccggagcctgcaccggtcaggcagtggcagtgaccacaaggaggagaaagccagcctgtcccttgagacctctgagagctcacaggaggcaaagagtccgaaggtggagctgcacagccactcagaggtccctttccagatgctagatggcaacagtggcttgagttctgagaagatcagccacaacccctggagcctgcgttgtcacaagcagcagctgagccgcatgcgctccgagtccaaggaccgaaagctctacaagttcctcctgcttgagaacgtggtgcaccacttcaagtacccctgcgtgttggacctgaagatgggcacgcggcagcatggcgatgacgcgtcagctgagaaggcagcccggcagatgcggaaatgcgagcagagcacatcagccacgctgggcgtcagggtctgcggcatgcaggtgtaccagctggacacagggcattacctctgcaggaacaagtactatggccgtgggctctccattgaaggcttccgcaatgccctctatcaatatctgcacaatggcctggacctgcgacgtgacctgtttgagcctatcctgagcaaactgcggggcctgaaagctgtgctggagcggcaggcctcttaccgcttctactccagttccctgcttgtcatctatgatggcaaggagtgccgggctgagtcctgcctggaccgccggtctgagatgcgtctcaagcacctggacatggtgctccctgaggtggcgtcatcctgtggccccagcaccagccccagcaacaccagccccgaggcgggtccctcctctcagcccaaggtggatgtccgcatgattgactttgcacacagcacattcaagggcttccgggatgaccccaccgtgcatgatgggccagacagaggctacgtgtttggcctggagaacctcatcagcatcatggaacagatgcgggacgagaaccagtaggccctgttctgggcccccagaaccccttcctctccactgcaggcagggaccattgttctgaacttgccgtgaggacacacagacttgcttttaaagggttatatttctctttggtgtaaactaaaagaaatgtttttagctgtagcctggaatccatatatataaagtgaaggagggcagaccacacgccctctcagccaggctcctcagctttgtggctctgactggtgtgtccaggctgccttaggaaggaagaggtgcccctggtgggcttggcagcagggacagggtgcccttggacattggtttctcttgtctagatctttgagatctgtggctgcagggccctgctgattgtaaggtaaagccctgggctggtgcagggcccctccacgcccactcttcccttgttccccagaagtagagggctctgggtgcccatttcttgggggctttccagtcttatgctgtgggtgtcagctagctctttaataggtgccctcagggcaccacagggctgactgcacaaagctggacccatccttcggtctgaccttagcatggggctagattaatgaagctgggctgaggccaacttatggcagagggcggcgcctgggttccccaggcacctgttggcacgtgacaggttggcacctgtcctattcctgaaacagcctctctcaccaagttcccttgcctaagaaggccactccctcccaccccactgaagtgggggatagtcggtgtcctagcaggcctcagggcctctggtggctctggcccagacagtatttgcagttcttgtgctatgggtgggagtcttcttcctcaagtttcggcagctgtgctgctgctggatgggctgctcctcccagggctcaagggctgtggtccgctcagggtctcatttccccaggccaagttcaaggcagcagccctttgtgaggcgctcttggccctgggcctggagggagaactttaagcttttttgctcacagggacgtggtatgggccctgggtgcaggtgcccacattctgctaatgagagctttgtctgatcagtcctgggtccatcagtttgtccatgtgtccggctgccagcccgtcccttgggatccttcccctggggtgtagccttgttcattagtatatactcattccttcatgctttcctcagcagaacacttccacttctgaggtgagcttttgccccgtgcccttcctccacaggtgttgcctttttataaagacctgatagcagaataaattggtgtttccctgttgacccagcaccatttctgtgggcctagaatatggccctcaacccttagagtggggcagtgagggcttgaggagtgacccttcctttctcatggttttagtcattttggctgccagcccttaatggcacagatctgctgcttctaacagatggccaggaggtgacaccgatttcagccattgccaaggttagcaccctctcctttgagcctagggccacactgttcattgtcactttaggcaagtgcctgtttggctttaaaggtaagcctgccagctgtgagaagccttggtaactgatggactcatttcctggtccttaaagatgcagcctcttaagggctccttgatggatgccatctctcctagcccccagccctggtgccactggtgggcaggttcccattctttggggctgggagggacagcttgcctgtttctggtcacaaattacagtcttctctcctgtaccattctgtggcttcagccatgggggcagtagcccttcattagtgtagatagtcattccctggtagggtggagggtaagacatagggtctggaactgtttgggaccttttggggatgtcctgtgcctcccagattcctagattctgggaggagaggctgccgcattctgctgctcctcacagcgagcaaagctgcacccacttacattcagtattttcctggcactacaaagagtgggaaggcctgggatttgctgctgctcccttagagcagggcccctcttttcagcactttggacacctggagacccagccctgttatttaatggtagtgggcaagtgtgtgtgcatactgtctgccactgctttctccctgccccatgccagagagccctgtccctgccaggcccagccttcttagccccaacttgggaacaaagtgcaacatgggatcatgggttggggtgctcaggtgagccctctctatagtgcttccctgggccaagctgacaccagcccctgagggtggggtgggacgggtggtgcttaaaagaggaaggggaccagtgtagcaacttgccagggaccccacccctccctctctgggcctgtgcagtgagcatggggattcccatcaaggggcctggcacctgtgctagttacgtagccgctgctcacgcgctcactcctgaccacatgcacgttccctagatgcagactgctttgaactttaaagctgtacaatttggttatgtttgtgctgacttaaaatatattttaatgaggaaaaaataatggagaaccctgggaaggacctggttcttttgcttctcggggaactgtaagccctcgcgttctgggaatcgctctctgctgctctttcctggaagctaagcctgtctccaccgcccgaggcctgcgccggtggctcccgccgcagttgcgtttgctttggaccttgcgtgcgggggagggggtgctcggtccgagcccgctcctttctgtacacctagcgctgcccgccccgcttgtgtctgaggtcgtgtatgtcaaaaataaagccgctagaaacgg

SEQ ID NO: 28774 - DNA, 5551 bp, Homo Sapiens
caggaaggaggctccgctggttccgctgggtcaggcgctgacgggaccgggctgcggcaatcgttagcgggtcatgtcggccgcccagggcgggggcagtgggggcagcgggggtcgggggacctgccaggccacagacctccaccagcacgaagtggacatcgttgtgtggcagataataccaacctatatgtgtttggaggttataacccagattatgatgaatcgggagggcctgataatgaagactatcctctcttcagggaactctggaggtatcattttgctacaggagtatggcaccagatgggcacagatggctacatgccccgggaattggcatctatgtcacttgtgctgcatggaaacaacctgttagtatttggaggtacgggcatcccatttggagagagcaacggcaatgacgtccatgtgtgtaatgtgaagtataagagatgggctttgctcagctgtcgggggaagaaacccagtcgtatatatggacaggctatggccatcatcaatggctccctttatgtctttggaggtacaaccggctatatttacagcacagacctgcacaagttagatctcaataccagagagtggacacaactgaaaccaaacaacctatcctgtgatctaccagaagagagataccgacatgaaattgcacatgacgggcagaggatttacatcttgggaggtggtacttcctggacagcatattccttaaacaagatccatgcatacaaccttgaaacgaatgcctgggaggaaattgcaacaaaaccccatgaaaaaataggctttcctgcagcccgaaggtgtcacagttgtgttcaaataaaaaatgatgtatttatttgtgggggctataatggagaggtgatcctgggagatatctggaagttgaatctgcagactttccaatgggtgaagctcccagctaccatgccagagccagtttattttcactgtgcagctgttacaccagctggttgcatgtacattcatggaggagtggtgaacatccatgaaaacaaacggactgggtcattgtttaagatctggctggtggtacctagcctgctggaactggcatgggagaagctgcttgcggccttccctaaccttgcaaacctctcccgaacacaacttctgcaccttggactcacacagggactcatcgaacgcttgaaatgaggatttctggactgttcattgatactggaaatgttaatttaaagagactcctttatttatgggcagtgtagaatgtgctacaaagaggattggttaccctgatcaaggccttatttagaaaatacatcagatgcctttctgtaaattggtttttcagtttatggacatctcactttcccacgtgcttccttctttgcttctgttcctcctgacccattacatgcacatgtactcacatactccctcttccttctcgatggagttaagggaaagcctgaaagtaccttaataatgttattaatcaagacagattcctttttaaaggaattctgaatagttccatgtcatacaatattctagaaattaaaacatcatcaacataaagaaaaatgaaattaaaaaatttttacatctagcaacagcaacaaccacaaatttaggggaagctgagaaggctaaccttgggaatcttgcaggttatacttaaacctagatgtttaacttagtgttttcaagatgtgtctaactgagtagtagctgggtctgatggcagcagtgcttgccatcttgttgcacagataactcaaacctaccctttggctttgaaggaaggttaagcagcccagcaactcttggttagtgatttctttctcatcctcatggtgccagcagtggttagagttggtttgtcaaaagacttacgtgtgtgtcgtggtcgtgctctttgttgttgctcttagaaattatggcaccaagaatgtttcaaacggaaaaacttgtggtggccaaagttcttcattctggcagttttgaaactctcttatgcttattaatggttttaaatatctctttgacttcttcatggggaattgtagaccctaagtatgtggtgtaaatgccatgtaacatgaacacaagctcccgagggaggccagagaagagccaggcagagaaaacctgcatcctctgggcttgttaacttggcttccactcgggctgtggtctttggctatcatcttggccatttccttttgagaacttgtttcttttctaatctctgggccaggtacctgccattttctcaggcagttggtccttgatttttcccttagcttgttgccttcttttccgtctgctttaatgtgcatggtgctgtgaataattgtctagtaattggatacaaggtcttgggggtaaagccacaggtcatccttcctgaagaaccaagtatcatttaaaaactagcatgaggaaggaatgaaactgagtagcattcattttgtgtgtgtgaaattttagttctggtttgtttgatttgttttttttttaattctaaaaagaatgacataaattttcactcgctttgccatctggctgctaggggagctgagcaagaggctcaccatgcgcatgtgtaagccgcaggtgtactcaaggtgctgaaggcgtgcaaggggcagcgctggtcctcccggggccaactcacagcaggagactcgcatgggagagttggaacacatctttcctttaagtgcctcttttttcacctagcttttaaagttattctttgtccttcatctcagaagggatctctttagcttatgtgtggatttaaaatgacctttgagctacggttaaaaagctaccatctggtgttcagttctgggaaagagaaaaccgtagcctccagacatgctcctgatttctaggccttatcataccatcccctctgtgatgggttgagttcatggagcctgtattctgggaagtcttataataaccacgcacctgtgaacgtgggtcctttctggggagtgaggaatgtgggagagaggcagaaaaaggagcagctcctctaggggcccatcctcccacatcttgccattaccagtctgtgtagcacttaacctcctgccaccactgccaggcttgctcctccgttctctcccagagcaagtcagtctgagcagctccattagtccaaaacagagctttgctgcatgacttcagcctggcctctggatatttggtggaaatatattctaaattgaacaagccaggctgtccagggtggcaagaggatttttgacctggatttatacagggaccaaagactgaatgctcagcctctgtgcttagactttcatggtccttaggatagaagtgagtctctagccctgctacaccagagagctgaagagagatgtggtctggttccatccatacttgctggcatcctttgttaagccttctgagggcagtcttctttgaggtagaccttggaggcctgacatcgaagacctgtgtgttttattttcataaaagtatatatccttggtctaaagtgtcttcttttaatataacactagtaaaaatgacatggtatgaccagcactgagtgctatagaaccacacatgtgtacatgttctggatgccaaatgagactgtgtgtaaatgactaagtgtagataactagaaattagataggggtcatcaggcgtttcggtatacctataaccagcactcggaattcctgacactgtttacttgatttaggaaagtttatgcctgctgcttctctgcctctttgaggtactcccagccgtcttactacagtcctgtaaatttaagtgcaatatatagaaacatatggatatatacagattatatatagggtgtaactataaagcaggtagactacttttttgcatcttggggaagtgagctcattactttaggttcaaattatgccaagaattttagatgtgatcagctggcttaagccaactcatgtcatgataaagctggattttcaagtccatgttttcttactccaactcttagagactcattgttccttaggtttgttagagttgagattttttttctccctgtcatctttgtactctctcatgtttgcatgtcttacattttgttgccggagaacaaggaagtccatctgtaaggagtttcctaaacggagaattaaaacctagtatttaacactaaccattctcctatgtatatactaatttatctgggaatgtaatactttattaaatgaagaaaatgatgctttcttcatttaatattttccacatcctggaaaaactataaactgacacagaataggttgaaatcttaactggggctaaacaaaaccctttccattggcagaatctccttttttcagggccataatgacatgatgtaaaaatttgctttaaaccattcatgcccttaaatagctagattttaaagcataataagcatattaacatttttaagcaaaagatacgttaacagtgacctttggttatccacagtagcaagagtaaagcacagatcattgaaatccatagataatcagtgaatcaactttcctaccaaacaatagattcatttacatttctttttcctccctatcctttcctgtaagcacctgtttttccatggaatggggttaatgagtaggtagaaaaggaaaaggaataatcagtaggagctgacaaccagtgaccatataagcagctgattgcctgtaattagtcaggctgaacaattagagttgaatgctgaaattaggaaccacaggtggtaatcctgagtagatgtagctcttcagcgtcatctcctgccctgagctccaggccatctctctaaccaccaaagaactcttagtacctacgggaaggaaaagctgtgtgcgacacagaggaaactccattatttgaacacatttctttggctcttgacaaatacttgcttttcctctaatcttgcaagagctatggctcttctattttccaatcacacagcttggcatgtaggaaaggttgaatgatcctctaagactgtgttggtcttcgtattctgtaaaacccattttttttttgtggtcttacagatgtttagaaagtggcacaggttactgaattgtctacctgccagcattctgatatagcacaaaaagctattttcctttattttttgtattattttttatttttctggcattgagctctagggtggatgagggtttatggtcctctgatcataagctccattctaaaaactggtcactgttagctgaaattgctttggttccccaaatgccttggaactccagacgcacccgcagggcctgaggtaggcttcatagagttctaggacttccgtgtgcgttgccaccagatcctgcccagcaatggcctttcccttctaaggtcattagattcagccaaaagcgacctcttctctagtccggtgttacgaacagaagttctgagttgtgctacaaaagtagttccatctttttggtgtaattttcatgtttttaatttg

SEQ ID NO: 28775 - DNA, 5585 bp, Homo Sapiens
gcctttgctaaattgctgaataagaagatggttgagtcacctccttcgcttaaacttgtcctcattggaggttgtcgtaacaaagatgatgaacttagggtaaaccaactgagaaggctgtctgaggatttaggagttcaagaatatgtggaatttaaaataaacattccatttgatgaattaaagaattatttgtctgaagcaacaattggtctgcataccatgtggaacgagcattttgggattggagttgtggagtgtatggcagctggcacaattatccttgcacacaattcggggggcccaaagcttgacattgtggttcctcacgaaggagatataactggctttctggctgagagtgaagaagactatgctgaaactatcgctcacattctttccatgtctgcagaaaagagactccaaatcagaaaaagtgctcgtgcatctgtaagcagattctctgatcaggaatttgaagtgacattcctatcatctgtggaaaagttatttaagtaatgccatatctgtaaaattaaagatattttatataaactggttaaacaccttcatatgtaaatatttttctaaattcaatctcatttgtcaaatcattttactttagaaaacagacaaaatttccttttagaataaaaggaagtgttgaaaagaaaatggatgactagccttcggcttccattcttggtatacatgagagaggctggctgctgagatgaatgtgaaccaggttgcagagaatctggctttgagccaccaggaagaactagtggatttgccaaaaaactaccccttgagtgaaaatgaagatgagggggacagtgatggagagagaaagcatcaaaagcttctggaagcaatcatttcccttgatggaaagaataggcggaaattggctgagaggtctgaggctagtctgaaagtgtcagagttcagtgtcagttctgaaggatcaggagaaaagctgggccttgcagatctgcttgagcccgttaaaacttcatcttctttggccactgtaaaaaagcaactgaatagagtcaaatcaaagaaggtggtggagttacctcttaacaaagaaaaaattgaacagatccacagagaagtagcattcagtaaaacctcacaggtcctctccaaatgggaccctatcatcctgaagaaccagcaggcagagcagctggtttttcccctggggaaggagcagccagccattgctcccattgaacatgcgctcagtggctggaaggcaagaactcccctggagcaggaaatttttaacctcctccataagaacaagcagccagtgacagatcctttactgactcccatggaaaaggcctctctccaagccatgagcctggaagaggcaaagatgcaccgagcagagcttcagagggctcgggctctgcagtcctactatgaggccaaggctcgaaaagagaagaaaatcaaaagtaaaaagtatcacaaagtcgtgaagaaaggaaaggccaagaaagccttaaaagagtttgagcagctacagaaggttaatccaactgtggcactggaagaaatggaaaaaattgaaaatgccagaatgatggaaagaatgagccttaagcaccaaaacagtgggaaatgggccaagtcaaaggcaattatggccaaatatgacctggaggctcgccaagctatgcaggaacagttggccaagaacaaagaactgacacagaaactccaggtagcctctgagagtgaggaagaggagggaggcacagaagtggaagaactccttgtccctcatgtagcgaatgaagtgcagatgaatgtggacggaccgaatccctggatgttcaggagctgcaccagtgacaccaaagaggctgcaacacaggaggaccctgagcaagtgccagagcttgcagctcatgaggtttctgcaagtgaggcagaagaaagaccagtggcagaggaagaaattttgttgagagaatttgaggaaaggcaatcccttagaaaaagatctgagctcaaccaggatgctgagccagcaagcagtcaagaaacaaaagattctagcagccaggaggtgctgtccgaattgagggcactatctcagaaattgaaggaaaaacatcagtccaggaagcaaaaagcaagttcagaggggactgttccccaggtccagagagaggaacctgccccagaagaagcggaacccctattgctacagaggtcagagagagtacaaactctggaagagctagaagagctgggaaaagaagattgttttcaaaataaggagcttcccagacctgtgttagaaggacagcagtcagagaggaccccaaataatcggcctgatgcccctaaggagaagaaagagaaggagcaactgatcaacctacagaacttcctgaccacacagtctccttccgtgaggtctttggcagttcccacaataatagaggagctggaagatgaagaggagagagaccaaaggcagatgataaaggaagcttttgctggggatgatgtcatcagagatttcttgaaagagaagagggaagctgtggaggcgagtaagccaaaggacgtggacctgacactacctggctggggcgagtggggtggtgtgggcctaaagcccagtgccaagaaaagacgccagtttctcattaaagcccctgagggtcctccaagaaaagataagaatttgccaaatgtgattatcagtgagaagcgcaacatccacgcagcagctcatcaggtacaagtgcttccatatccatttacccaccatcggcaatttgaaaggaccatccagacccctataggatccacatggaacacccagagggctttccaaaagctgactactcccaaggtcgtcaccaagccaggccatatcattaagcccataaaagcagaggatgtgggctaccagtcttcctcaaggtcagacctgcctgtcatacagaggaatccaaaacgaatcaccacacgtcacaataaagaagaaaaactgtaggttgtgtagctggagaagtgacagtcaggggccctgattccacttcctttggtccagttttactctgctacagggtggattccaaaactggctcagcacattgcatgtagttgagccacattttttaaaaaaagaaaatggatgaccattaattgactagcattttagaattgatcagacattagaacacagaaaaattctagtacatttaaattctaaacaatacagtggatgacccttttgaatatacctaatgatttccttaaaaaagaaattttaaacagacttgtttaatcgtgttctcaaagcatacagtcaagaggtgggactgactgatgctttataggtgtgtgtagggtggtagaggccaaggtgctgccagcaatcctttccatactaggtactggtgaaaattgtttttgtttatgctgtcagcacatttgtgtgggtctctcattgtcccttaacagtgccgcatctcagcctggaagtcagctttaagtcattcaagagaacctcaggctgtttttctgacagtgatgatatgatatacagatacatccacagggtatctattaccagcataatgcattgtaagatggcaaggtggcattttgaaagagcgctgggcaagcagttagcacatctgggcctaccttcagcttcttcatttacaaacttctgaccttttgacactaaagctgctcctttatctttctgagtctcagattcttcatctgtaatctggagttgttaattccagtccttactaccttttagagttggaatgagatggaaagtagatgaaactactttgaaaattacgacagttaagggctgggtgcggtgtctcacacctgtaatcccagcactttgggaggccgagatgggtggatcatgaggtcagcagttgagaccagccaaagtgctgggtgcggtgtctcacacctgtaatcccagcactttgggaggccgagatgggtggatcatgaggtcagcagttgagaccagcctgaacaacatggtgaaaccctgtctgtactaaaaatacaaaaaaattagctgggcctggtggcaggcacctgtaatcccagctacttgggagactgaggcaggagaattgcttgaaactggaaggcagaggttgcagtgagccaagattgtgccactgcactctagcctgggcaataagcaaaactccatctcaaaaaagaaaaaaaggaaaaagaaaattatgagagttacttaaaggtaacatcacatactaaatgtcttctataatcctatatttattaatgcattacaactctgtagattgttagttactaggccagtagctaggaattggtataaatttaatgcaccttctatcctgaataactagcatggaaaagtgaatatatgtgtgagcagatatggctataaagacctatagcttttgcactttatgcatatataatcaatcctttctagttcagtgaattgaccccatccacaggctgattcatctttgtgttaaggggcaaatgaaacggtatattatttctttgcagtctcctctcagtcattcatcaatgtggccagcttatctactcccaattatgttgttgatacatctccaagccatctgtcatcagatcaaaaagcagcaaacagagggtcagtcacaggatgttctgacacaccattgtaactttttgttagagatgatcccatttagaaaaagactggtagaaattggagtgaaaggaaccctacagattagcccagttctctcttattttcagctttacagacaagaacaatttaaatctaaagaatttagtagattccttcagtgtcacaaagctgtttcatgaaagaatcaagattataacctggatattctgactcctggcccagtgctttttcttactttgtagctacactttgaagtaagattcaaactgttatccactcaattgccttattcctgaggatgtagtcaaggaagaaaaagttttctggaattccgtaaattatattttaagcttatttcttcaaaattattttcatatatcacagatatatcattggaagatataatttgcatatatgttcattatcagtgttcctaatttggtattacatgtattctatttttttctgaatgatagcatgaaaagtgtcaaagtggtttgtccgctagcgtctgtctgcagaactttcaggatgactattaattcctctcagatgtcatttttgagtggtccaagcctgctgttttgaacccacagcagtggagatttgtattcttatttacagttgtgtactataaagtgtgtgttacataggttttgtgtaataattatttgtaaatattatttagatttgtatttagacatgatttatatctaatatagatacaaagtctgtgtctaaatattatttaaagaagtgatttttcattctcttggattctttccagtgtggtgccttttatatgcctcacatagtctccttgttctcctactaatattcccaagctccatatgccaattaaagaagaaac

SEQ ID NO: 28776 - DNA, 301692 bp, Homo Sapiens
gatcatgattggtaaatctgtagtgactaattgcccactgctgcctattccatctgacctaaattcctcaggtcttctaacattaagacctcttcctggccggttgtgctggctcatgcctgtaattccaacactttaggcagctgaggcaggcagatcacttgaggtcaagagttcaagaccagcctggccaacatggtgaagccctgtctgtactaaaaaatacaaaaattagccggacctggtggtgcgtgcctgtaatcccagctactcgggaggctgagtcaggagaatcacttgaacccggggcagcgggggaggctgcagtgagtggagatcaaaccaccgcactccagcccaggtgacagagcaagagtcagtctcaaaaaaaaaaaaacaaaaaaaaaaacctcttcctatagctaactcccacttaccacccccatcatgaacactcttgatgtatttacatggtttctccttcgaacatcctcctttcttctttcttaatggttgttatcaaataccctgataaaaaacaaaaacaaaaaacctcctctgaaggtcccttattcacccttccaacgctacaggtctgtaactctcattttctttttaaaaaatttttatttttttaatttattttattttttttttcagacggagtcttgctctgtcgcccaggctggagtgcagtgacacgatctcggctcactgcaacctccacttcccaggttcaagcaattctcctgcctcagcctcctgagttgctgggattacaggtgcctaccaccacacctgacctcaagtaacccacccacctcgacctcccaaagtgctgagaatacaggtgtgagccatcatgcctggccaaaatttttaaattttaaaaaatatattttattttttgtagagacagggtctcattttgagcccaaactggtcttgaactcctaggctcaagtgatcctcctgccttggcctcccaaaatgctgggattataggcacaagccaccaggcctgatccttacttttcttctgatgaattcacatatatgtgcacaaatactttatactaaattgtatttactgatgtacttttttcactgtgccttttctttttcttgcccagatatttttctcatataaacattagctccttaatgggagcaaatgaaccagtttttttttaattcccacccaaagtgagaatataaaaattttttattgatccaccaatactgaacactttcatttctaatagttatatttaactgaataaattacacacgggacaaaaatgttatttaagggataaagttgggtgtttgctcagggacaacgttgtatattgaatgatttggtgcttttgtgaatttatcattcaaaagaccatcgtgatggctaaataacagaaaggagagctttattggcaatatcaatttgcaaacccggaagacatagtcttcggtgtatgctgaatgtggtctctcttcaaaagagaggaaggacagttgggtttcatgcctcacagggtctgtttcacacagtggagtcatacatattcagcaggtttggaggaaaagatatacatatttatgaggggagctgagtgcatgtgcaatgggtaaatatgtatgtgacatcccatgtacactttggggcagggttttagtgttaaaatgaggtaaaatttggctctttacatcaaaaggtgaactacaggacccaaagacagtttgtgcacagcctctaataaactggctgacactggcttaaggtctgcaattgcttatcagaaaagaatgtttgtaaggctggtcctcattccaattagagttgtagtggtctgggttgtaaatcacaggatggggctgatagttcctattattagggagtttagagccatagaaattgagaaattggtcatgccagccagtccccgaaccctaaccctgtaggtaactttgtttccttaaccttacagtccatcttaggtgataaaggggtgtctgttttggtatctcacatcacaaattgttggttggtttgtgtgtttgtttcatcattcaggatgttgtttctttagggaatgtgaacctgaattctcaaggcttgttagactgtaatgttcccattcattttaggtttagctcatgcttctctagccacagccttcacttggattttaaaagttgaattactcatcaaagtctctaggacacgaaagacaatccttaggtatgatttgaccagtaaaaaagagatccagctgccttgaagcataagatcccctcggctccaatgtctatcactaatattcagtgtggcaaggatcccaggccacagagctgtggcttcctgcagctgctctggggagtgactctcttggagcatgtgatgtggtcttccattgtgcaggaccagcccagtggcatcctttcaacacctctggcaagcagcctttccaagcacgggtgccgtctgaaaacaggaggcatatctttcacatcctaggcacacgccctagggagtggtcagggttttgtccagttctcagcaaactagctacagctccatcccttactcccacactcaagagagatactagaatacaactgagagtagcctgatatgatgctaacctcgagttgcttttatttaaattaaaataaatcaaccagacacagtggctcatgcctataatccctgcattttaggagatcaaggagggtggatcacgagctcaggagtttaagaccaacctggataacatggcaagaccccatctctacaaaaagtacacaaattagctggacatggtagtgcgcacctgtagccccagctactctggaggctgaggtgaaggatcacttgagcccaggaggtagaggttgcagtgagctgagattgtgccactgctaataattaattaaataattaattaaattaataaatcgtgccactttattaaataaataaaacaagagtaaatcactcacaaatttggagcttttattagcaaaacattacttaggaaatctaaataaataacacggggttgacagccattgttctaactggcagcccctggcaagctcaaagccaggattatgctggtcacttaagtgacagctattgcgaattgttgttctctcaagaaaaaagaaccgatttctatggtaaaccaggcactgtgctgggtgcctttacaattcatcaccacaccacctaatgaaaggagcattcttcagaaactgtagtgctcaggctttctcaaggcctgagttcttttccaccagagcatattgttgccctattatccaaagttctctaaggaagagaactgacgtaagacccacatggctccattacatcttctggctacttgattgattttcatactccctacctctggggttggtatgtactatctatttctttctcctctcgttcttcctttttattccataaaatacaggaatattcctgtacattagtccttgcagcaaccttggaattactacattcctcaaacaagttatggaagccagctgccaatattggtccctggttaaacagtgaattctgttgttccatagagttactactgaaatacctaagccattttgtaaaatataatttagttgatctgaaggctgtctctaaagcagttttatgtagtgattacagagaaggactaatttcaagagtattttattgtttaaaaaaatgtaaacattttatggatgcactagtgaagtaaagaccaataaatgaagcagtaactttaataaaagggtaagtaaaatgtcacatcctctgcctatattcaggtctgttaggtatgtgtagttaaatgtaggtaagttagttgataattatttatttaagcatttctttatgtctactcattaaaaagaaaaaaagattaaaagaatgttactatgtgaaaaactgcccatcactggggaaaagaattttattatgcaaagcttcaacgctatttacagtttagacttttgtagctattgaaggctgacattgagataaagaagttaatcatgtccttctgtcttggaggaggtagaaagagatgagaatgaatacaattcaggatctacttctggtctttgatgaggagttagcacacggttctgggaggaaagacaggttaagaggcatgtgaaactctcaaatacgtcactgcgtctgccaacgtacatgatacccagcaagctcacatcttcatggaaagcatggtaattcccaacactaccggaagtctggagtggctaagtaatccatatattcaaccaggaagcagctaaagaaatattctaattacctaggaaggtttctgatttcaaaaggacatgaataaaaagtagaaggaatccactcccaaggacggacatcagagtagcttaaaatgtgagaataattttaggggaattttagaggtttggttatagacttatgttcccccaaaattcatatgttgaagccctaacccccagtaccttagaacatgactgtatttgggtagggcctttgaagagctaattaaattaaggccactggcgtgggccctaatataatctggctggtattcttgtaagaggaggagattaggacacacagaaataccagaggtacctgtgcagaggaaagaacgtgtgaggacttagcaagggtgcagccatctgcaagccaaggagacctctgaggattccaatcctatctgcatcttgatcttagacttttctggaactgtgagaaaataaatttcttggtttaagccacccagtctgtgatattttgttatggcagctctagtaaactaatacagattttaaatgtcattaaatgtcaatgtttaagctttgacaaaattttctaaaggaaagtataaaaggtcattttctttcttttcagagcctgatgattgcgggaggggtaagccagctgcatggggatcatgatgcaatgctgatgcaggacagacagaaagtagatctcttccatttctattttttttttttctgttgagttgaatgatcttcagactgaaaatgaaagaaaggtcactggaaataaaggccaaagatgagtgacaggattatagaataagtcttagctgttctaaagaaggacatattatgtacccccacccccaaattcatatgttgaagtcctaacccgacagtgtctcaaaatgtgaccatatttggagatagggtcaaagatgtaattaaggttaaatgaggtcattagcatggatcctaacccaatatctgctgtccttataacaagaggagattagggcacagtaagacacagagggaagaccatgtgagaatacagggagaaggtggccatctgcaagccaaggagagaggcctcagaagtaaccaactcagccaacacctcgatttcagacttccagcctcctgaaatgtgaggaaatacatttctggtgtttgatccatccagtctatggtaagttatggcacccctgcagggttcatctggctcagacttaacgattgcttttggtgatatttatagggcacagataacagcctaaacacaagacgacagaaacgcggcccagcagactatgcataaaatagaaatggggtatctggaccaattggagtctgcagtgggatgcggttactaaaacagtcaaatgcaacatgaggctccaggcagagtagtgggcaacatctcccatgttgcagcagtcagagcacacttcgagtactgtaaaaagacacagacaagccagaacacatttagagaatggccaaggtgtggaaggaaccagaaaccatgccattatgcaactgttgaaggaagtgcctgttttaccttgtgaagagaagactctagaggaagaagtagcatgaaaaccgctggcaaatttgtaaagatctgaagtgtggaaaagaattattctgcttggtcactggggatacaaggatatctgagtgggagtttaaaggcgggggatgtgagctttaaatgggataagaacattctagtaaccagaaatgcccaaagatagaatgcacagtctggagagccagtgaatatctcacaaatggagacacttgaaactaggatggggatgctgttgtaggaattccagcagacaagtggttgttggttccttccccaactttgtagggttataactagggatgttcctgcgttttctgcttggaggatctgcaagacacctcagggcaggaaatggcattaaatgcagaacagagctagtggctgaaaagcaaaaagccatcaggatctctgagtagtgaaggaaccagagaacatgcaggcaatgtccatcattctgacgcaatcagcagcataatcatcttcccccaggaacatcttgaccagggaatgtgtcagtgtggtgaatttcaacagtggaaagagaaactgctaaatctaagaactttaatttttatagattatgatctcatctctacaattttgaatttcatgctcaataaaagttccttactctctttttttttttttgagacggagtctcgctctgtcgcccaggctggagtgcagtggcgcgatctcggctcacttcaagctcagcctcccgggttcacgccattctcctgcctcagcctccccagtagctgggactacaggcgcccgccacgacgcccggctaattttttgtatttttagtagagacggggtttcaccgtgttagccaggatggtgttgatctcctgacctcgtgatccgcccgcctcagcctcccaaagaaaagtccctcactcttaaagttgcctcctccttcccagggctggcttcatgggcatgcaaccctggagagtctcacaggccctgcggtgggaggagccccatgcttggtttaacgctctgccattgccatcttaaaattcttaatttaattttttttcttttttttgaggtggagtctcgctctgtcgcccaggctggagtgcaatggcacaatcttggctcactgcaacctccgcctcccaggttcaagcgattctcctgcctcagcctctggagtagctgggattacaggcaggagtaaccacgctcggctaatttttgcatttttagtagagatgggggtttcaccatgttggccaggctggtctagaactcctgacctcaggtgatctgcccacctgggcctcctaaagtgctgggattacaggcatgagccaccaggcccggccttaaaattcttaataatgtaacaaagggtctcacgtttgcattttgcagtggactctgcaagatttgtagctttggaccacgtttctctttgcattcagataccttcttttttgccttatttgctcatgcagacccggaacaaatacggaattgcggtgggtaaatgtggtgcagaaagtgaacaactgggtttgtcctgtcactttaggcttttccctgctgtcccagcttcatgtcacttacttgctattagatttgggagttcattagcttcattttcctgatgtataaataggaataatagtaacagcctctttggcttttgtaggaagtaaatgacatgaagcgtataaacaaatactgcatgacaataaatatttgtccttatttgttgaggacatccaaaggacattcaggggcaaaagtaatccaagagtcaagactgaatgcctagtgcgggaaaagacacacaagacaacatttaggggagctggtacagaaatgacttcccaggaaggaagtctgtaccccgctggctgagccatccttcccgggcctaggcacccttgtcagcgcaatgagcaagggagagaaggcaggctgcagtgcagccctcagaagggccagagcactccctggcttcagtccttcgctccaagccctgtgtggagtgggctgtggcttggtaactaaatgctacttcaggtcaagagcaggggatatatctgggcagttctagagcattctaaactatctggacactaactggacagtggacggtttgtgtttaatccaggagaaagtggcatggcagaaggttcatttctataattcaggacagacacaatgaagaacaagggcagcgtttgaggtcagaagtcctcatttacgggggtcgaatacgaatgatctctcctaatttttccttcttccccaactcagatggatgttacatccctgcttaacaacaaaaaaagaccccccgccccgcaaaatccacactgaccaccccctttaacaaaacaaaaccaaaaacaaacaaaaatataagaaagaaacaaaacccaagcccagaaccctgctttcaagaagaagtaaatgggttggccgcttctttgccaggtcctgcgccttgctcctttggttcgttctaaagatagaaattccaggttgctcgtgcctgcttttgacgttgggggttaaaaaatgaggttttgctgtctcaacaagcaaagaaaatcctatttcctttaagcttcactcgttctcattctcttccagaaacgcctgccccacctctccaaaccgagagaaaaaacgaaatgcggataaaaacgcaccctagcagcagtcctttatacgacacccccgggaggcctgcggggtcggatgattcaagctcacggggacgagcaggagcgctctcgacttttctagagcctcagcgtcctaggactcacctttccctgatcctgcaccgtccctctcctggccccagactctccctcccactgttcacgaagcccaggtgggccgtcggccggggagcggagggggcgcgtggggtgcaggcggcgccaagggcgcgtgcacctgtgggcgcggggcgcgagggcccctcccggcgcgagcgggcgcagttccccggcggcgccgctaggggtctctctcgggtgccgagcggggtgggccggatcagctgactcgcctggctctgagccccgccgccgcgctcgggctccgtcagtttcctcggcagcggtaggcgagagcacgcggaggagcgtgcgcgggggccccgggagacggcggcggtggcggcgcgggcagagcaaggacgcggcggatcccactcgcacagcagcgcactcggtgccccgcgcagggtcgcgatgctgcccggtttggcactgctcctgctggccgcctggacggctcgggcgctggaggtgggtgccgcgcctcggaaggcggggggaggctgcacggtggggacgcgataccccccaagaccttaacccaagtctttaatgcagagaagccgggggtccgtcaatgggacccctctcctctccgcccccgcttgcggacgtccagcgcatccccgctttcggcccagccctgccccagggagtcgcgctccggcccgctgagagggagcgggcgaggcgctggtctccctggttccgcgccagcccggggcgagaagggtagggggcgaccctgagcccagaccccgacttagtccctgccttggaagcgggggtcgggggaggcgagagacattcagacaggggggaagggggaaggagcacgtggggaaaaccgaaaacgcagcgtccctaaagccagtccttcgctcttgaatcgttgccctttcctttctcttgggccctggggaggaggaggaggagtcgggacagcccaggaagctaggagcccctcgcttttccctgcgttctccgcctcgtttcaccttcctctctcacccccatcccccttccttgctccaacctcttttcgcggctgctggcggcggcagcctgggtgcgaccctagcccgagccggcgtcggggtcgcgcaccgccttccacaggcaaactttgtgcatgtccgcgtctcccttttgtgtaacttgcgagaaatgggaggggtcggagacccatagccaccccgcgccttccccaagtctggacgtcccgggagttcgctcgcaccctaagctctgtctgagaggcagaaggtccgcgggaacaaaagccgcgacaccccgccctcgccgtgggccgagccgcgttagtctcagtgcgccaccgaggctcccgcccggctcccttcccggggctgcgcgtccgcctgggagggggcagagacgctgccggggcttctggcggagcctcggggcccctctgcttcccaccctcggatcacctccgaggcttaattctgtgctgggctgtaaagtccttggcggggaggaaataaggcggagagtgggatgtgcgtctggaaagggcagtggcggatggtggggaggcacgggctctgtcctgtgcatccaaggaggcgtttgtctgattaaggcgcggcctcttccctggcagctctggggactctggtttagttcccctgggggcacaggatgctggggagggtccgaagggtcttttttttagggtgcagataaaaggatcgaattgagtgaagattaagacggagaagatggcgcctctgcagtgcagcaaagaaaagctgtgtggaggctgcagcctagtgaaatccacccaccactaggtgtataacaagtcttccccattcatccaactctcgaacattcagctaacgcctgtgcacaatgactgtttttctttacatctgaagatgcttagaagttgtttgcatgacagttgggccagaggaggctgtatttcacttcggacttcggttgggttcctgtttggcatcttaacatttgcaaccttccttacccgtttttcccctcttttcccccagcctcctagtaattttccaaaagaaaaaaagcaatttccgggcagatgttttcctgtaattccactgaggctgtacagactatcacaccattagttttttagtttctaatttgcaaggtcattgaacttttttctcttctgatttttacccacaagtggctcaggaatcaccttagggctagttaagacaggttgttttaagagttaaagaatttcgttttccatgttttaaaaaaatgcacttaactaagagaattctgatttctctcatgacttacttacatttatttgtagaattattccagttttcccgaatggtcttactacagattaaaaaccatacatttaaggaattaaaagcatatgataaccgtatttttgaagcttttgtcaaaacttaaatatgtaactttgttgagcaatatttctttctgtataaaaagaggaagcatgtaggcagattcgaatttagtttttggtctgtttaattgcattaatatgctctttctgccatcttttgggaccttttcagtagctattgttaactcctttaaagggtggaggtgagattcacattatgccattttgcgaagtgttggtagaagggtaggtaattcagtctactgaggtttgagggtggtttatctggttctctctgtgtccactgaaaagatgtaattacgagttgactgtcttttatagagcttagaaaataggtctgctgcaggtggctgtagaaaagaaatgaataagggcaatgataatggggccttggctatcgggggaaacatggttattatctgggttgatgattttggctggtatgttgatagaggtgtgagtttaacaaaccctaatctatatgatgtttcactaccctaatatttatttatttatttatttttaaatctagcttcctcttaagttttatttccctctgttgagggtttaacctagtcacaatcatcttacctttgtggtagtgctaatttatagtttatggaaacctgctgctactgactagtacctcgctaaaggtagaagccgacacacagaatagtaaagctcaggtttgatggtgatctgtaaggagtcacggttcttgctaatcgatgagaaaccatgataactggcagactgcagaagcttttctcttgtcaccggaaccagcagaggctcctgaacgacatttgcaaggctattagtactgcggagaagttactagatggaataatactggtcctgactgaggaaatgaaaaggaacatgcaagttcacgaggttaaatgaggaatggctgattcaaaaaaattaaaaagaaataacgtgatcaacaatattggtttgaaggaatgggagaggttgtctttatgttaagtcttgttgctagaggatctctattttatgttactgttttttgcatactagagtcttctacagatatttgtatgaatgttgtcagtcattctggaaataagcatagctattacttgcatttcacgtggccactaaactatcagtgagaagtgcattaaattcagtagaaatgtacattgtttctgcaaattgtattaccttgagaatcttacaaagcatctttcattaatacatttcttttaaaatctctatcaattacaaatgtaaagataaacctgtacagatgcattttaaatttaaagcttccagaatgtaaggtttagttcgactgcatacctcattacctccccttccctcctccctccccttactcccaggaagtttgcagggtaaataaaacatgcacatgataataaaacaaagtggaatgtactaaaataccaaaaggaaaatacagattaggtatactgagtaaatatgttacagagaaaacttcctgtatttaaaaagtaaggaacaatgggatgagatcatagataatcctggagcatttcctggtagtaaatttccagccaggtttatatcccaggtctggggattggaggttaagtttctgcatatacaatatttgtttacattcctctctgcctctaccagacagacagacagacacacacacacacacacacacacaccctctgtctctttctctctctttctctctctctctctctctctctctctctctctcacttgagtgacagatgctggtgcagggtattctcaacaggagtagggaatttgaaataaggagttgagaggtcaaaggtaaggggctgaatgcaggaccagagagcttcagtagcatcttgatgggcagagtatgagatgaacagtggcaacgaggaggatagggaaaaatcacattttctgtttgtgttttgtttttgtctggtggttttcaacctctctctgtttcacttgactatgcttgattatgaaatcttttttttttctttttttaatttaaagatctcaactggctttgttgtgattctacattcaggcaacactattctgtaaaatagtataaatgttccgatgagttgaacagaggagattggctttgtagacagaaaagggctgaagaaaacagaaataaaaaaatcttttccttttcatagtgagagctcagatgcaaatgtatggagtggggatggatgggaaatgccgtcttttgcaaacccttggaaacgctgtcaccctgtgggtctcacagccagtgtacagataacaccctcatctgtacacagaagacagaaggtggcaggggaaggaatgagcacaccccagaatgagtagcaagtttaatcaataaaatatgtatttctttttttattgttgtataagaagaaaagcagacagaactcaaaccctgaagctgattttgcaagtgaaaagcttagtaaagggggaaatgttatgtaactattttttcagtttagtgtggatggcttaagaaataatcattactgtgaggacactagtatttttcttggaaaaaaaagtttggcaaattttcctctttagattaatcttggttatagattattattatgcttgagtggtacctcttcagaagtagaaatctggcaaaaactggagtacaatgattgctctaggaataaattcacatatttaaatttaaaagcctggatatgtgcatcaattaatagctttatgaaacagggatgcttagtagattagctagctgagtattcagagagggccacagaagtctcaggttcacatgtattaaatctgctgaaatagaaacctaagagatcattttatttaggtttattttgtgtggctacatgttgaagaaacatgcaatagagatttagcttgaaccttgcgagactcacagtatcttacgaaagaagatagttaaaatggggaagatgagaggtttttaaaaatgtcacctctgtagaacgaaccagagttgttctcaatttataatgttgaatttgatgccaggcgtgatgttaggccaataacactgagtcattgagtgtttctcaggtatgtagagaaggcagcattgcacactaatcaggagagtttagaccagggcaggaatgcatgggcataaattctgtctttgtttcttttgagctagtgaccatgggcaagtttctgtgcctcagttttttcctttgtaaaatgggatgagtacttctagttattgaggatcgaattaatatctttgttaaatgcttgaaacagtgtgtgagttaatatatatgtaacctgatggcatagcataagcactgtgtgttagttgctgctatgtatggtgatgatgttgatgtacaatgggtatatgtaagtttcctgcatagttgaaagttaaaaatctagatgatgtttcacttattgacaaattacttattggccaattaagactattgcaggaaattgacagattgttgtctatgagtttgatctaaatttaaaaagcacatggtatctcagatacaatttttagaatacatgttataaaatttcatttattaaatatgtattgtgtatttcaattggttttttgaaaaatgaaaataattcatgctcattgaaaaatttaaaacagtacagaaatgtgcaaaaagcataagcattttttacacaaatgggaaatacctagtttttttttttctttttttccacataacatggatgtagaccttttttttttttttttgagacagaatctccctctgtcacccaggctggagtgcagtggcgcgatctcggctcactgcaacctccgcctcctgggttcaagcgattctcctgcctcagcctcctgagtagctgggactatgggcactcgccaccatgcccagctaatttttgtattttttaagtagagatggggtttcaccatgttggccaggctggtctcaaactcctgacctcaagtgatctgcccacctcggcctcccagagacctattttttaatgttgtacacactggcagcttgccacagatgtctaatattgagcaagtttatacactggcttgattattaactattagttggctatcagctatgtgcaaggaactgtgaacagacttggtttagttttcagtagaatctttgctagcaaaacgaataaacaggctttgccaatctgggtagaaatggaagatttcaaatgccagcaaaagaattttggtcctaatatggaagcttgaagttatgttcacccaaggacagggaaaccaaaaagcagattgcttgagaatgcggcatttctctaggaaatcagtttcaaaataaaatgaattttttgttttgttttgtttttgagacggagtctcgccctgtcgcccaagctggaatgcagtggtgcgatctcagctcactgcaatctccgcctctcaggttcaagcgattctcctgcctcagcctcccgagtagctgggattacaggcgtgtgccactatgcccagctaatttttatatttttagtagagacggggtttcactatgttggtcaggctggtctcaaactcttgacctcgtgatccgcctgcctcggcctcccaaagtgctgcgattacaggcgtgagccaccgcgcccagctgcagtaaagtgaatttgtgtaaccagccatgttatggctgttacatctttaaaactttatagtgatctgctgtttaattgaaattatatattttttttaaaaatcagcatatgttgctcaaaaataaaaggtttttagcttcaaaagcaggccaaggatatttgaaagccttgagtgtatgaaactggtgatactgtggttaaatgatgatgaacgcagggaaaaatcaagaagcagagtcccaaagaattcacatgggtttttgttaaccagctcatgtaattataattgtcctgtccaactaaagacaagaagacaagaagtgggttcacatacgaggatgtgtaatgacagaagccatatttgtgataaacatcctgattacagtagatacagtgaggagtgattaagatggttccagaagcaggagtggagggttcatgagcagggatgaggaataaataggacaaacattttggaaaagggaaaagatgaataagcctgttttgtaaattaatggatcctgatgaatgaagtgcagtgattccttaaggtcttattaatgatggaccccaaacagtgtttgaatctcttaatttccagatggttcctttttttcttcacaaagtcagaaggttttcttatgagaaatttgattcaacaagaataattgtcacttcttttgttttttggtgatttttttttttttttttttttttttttttgagactgagttttactgtgtcacccaggctggagtgcagtggcgtgtcttggcttactgcaacctctgcctcccgggttcaagcaattctcatgcctcagcctcctgaatagctgggtttacaggcatgtgccaccacgcctggctaatttttgtttttgttttttttttttttagtagagacagggtttcactacattggccagggtggtctcgaactcctgacttcaagtgatccacccacctaggcctcccaaagtgctgggataacaggtgtgagccactgcacctggccaattttttggtgattttgataggaatttttttttttgcctgatgctttttttgagagaatctaataatttgtctcttatttaataatttggctttcattagcttccagaaagccacatactgtcttcattgaaaaatgtaaggcatcctagatgatacagactgataaattacttttcagccataaaagatacttatgagaataagagatctgttgcataaagaaaagtcatttgtgttaagtgaagaaatgcattattactcttgctgctttgctaaatttcaaacattgaataactaatatattttgaccccctggagatattttacaggaagaaaaatgagaggtttaatcctactgttgagatagacttaacgtgttttagacctgcccctcatcccaagttactacaaactcatttgtttagtttttccttgtctgtgtgctcgttatttcacagtaaaattagtgaggcaacataaattttatttttaagagaaagtaaagaaaatggctttatccattaaaggtttattcatcttaaaaaaggacttgttatatctactcctactattggatgaattttcaaaagcatattgatactgtgtttggttttgtttgttttcgggacaagtcctcactctgtcacccaggctgaagtgcagtggtgtgatctgtagccgtggcctcctgggctgaagccatcttcctgccccagcctccagagtagctgggactacaggcatgtgccaccacatctgactaatttcttaaatgttttgtagagatggggtccccactatgttgcccaggctgatcttgaactcctgggctcaagcgatcctcctgcctcgaccttccaaagtgctagattacaggtgtgagctattgtgcctggccaatgttgtttttataaatatcattactcagttattttgtttataattgaattgataggctcatagaataaagatggataagcactgtttcttaactgtatttattgatttttttatctttcaaaaaaaaaatcctcatctacttcaaagattaagcctttaaaaccgatgcaaagtttttgaagtcttagcttaagtcttcagagactaacattaaaacccatcatatgaaaagtgatatgtagtagcaaatattctccatcctgatgctctcaattgcttattatggtttaacacaaatataattttgtcattacagtaaattagtttgaggatataactgaagagtacctaagaaactcccatagaaatgtgaaaatatgcagactaattattctaagaataattaatcatagatacttacatattaaattgattagcaatttaaaattaaagccaaatttctgtggaaattagcttattttcatacacaaagaaacctagattcttaggggtacaaccaagaaagggccactccttcatttcacaaatattttcgaggtccttgcccccaagagggtagacagaataaaaaggaggaaggaagtgacttggaaaaaattaagttgggtaaggaatataagagaatgctacgtagaaggatgtgtgttgtgaatgcaatagtttctgtagtattgtcaaagttctctgatcatttcagtatgtgaaggtaaacttagataactgggggaaggaactatatatttactacattgtaaaagaataattgtagacagaagatctactttgggtgattaaatgttgaaaacaagtggtgggagagagaagttagtgttgattgtgatcacacacttttctatacagtaatttgtttgatcactcatgataatgccttacattttgtatgtactaaataaatgagttctctagaaattctatgttgtggtgataaagaattacgttcagattgaagattcgaacagctgtgcaaccttctcaacatttaagaaactgcgaacaagcatagaaagaagattaaagccttttaaataagattcttttttttcagcctctttttggaacattttattgtgaaaaggtttcataaatactgtcaatacatcacgttcagtcatttgcaattgtatttcaaaaattcagttggcctgcaaaaagaaaaaatgcctcatttttgaaatatttcatccatgccctgattgattgggacactttcaatagagggtgcctagacataattttgtgtgaagaagttagtagagtttggaaagaaaatgtgtattggaattaaatttagtggcatgaaaatgaaaatttctctgtcattgtctttttttttggctccttttttggccattttacagctagtgtttagtgtgacaaggatcaaaattggccctttaaaaaaatatattgaattctattacctctgttatctaaaagaattgtatttttcaatttgaagagcttgaagccaatactactatataccattaacttgacaggaattgaaaatctaattgaggtcattatgattagccttgtatcttgctagtattttctcaatcttattttgaatgttttgtgtcaagtgttaaatcctcttataccacagaatccagaaaatttaaatgcaacagaagtaaaacgaatataaaaattctatggttgttgtggaggggcgttcttggctaacccatagggtgtttgaatgtaaaggcagcttacagaactgctgctagttgaattgtggagggtttcacttttaagagtacatttgagacaaaattgcaattttggaatcacttattcctgcttgttcagtgaaataggagaggggggaattcctgagggaagctgggagatttccaggtgatgatagagtagccatgtgagtatttggctgaaacagagtagaagccacctctgtctgttggacagaggtggccttaacactgagtatcaatcagcatggccattagagctgtccaggacaaacataatgaatgttgtggtggcagagagggtatacttaaatgaacaaaattggaggctgactttccttgtttcttggtagttcctttcttcgtatttgctatttggatatttcacttcacttttgtgagctagactcaaaggttaaatttatatcattgtgaattttctgggtcatattgtagggacacagatgggaagcatcccttcagtttattgagagtatttcttatgcgcatgtgtttttaattgtatttattgatttaataaatagccgatgagatgagaaaaaaatattagtgtcttgttgttgcagagaaaaagacattggatgcattcttagaatttattatcacatgcgaagttatttagatttacaaagcaatctgacatgttgacttcattgctcgtttgctcatttctatcagaggttgaacacaaagccaagcctaagcccgtgattcttctgtgtgcagatgagggggaaggtttaatgcagaatgtttagctgaatatttggattgtgcattccccttttatgtctctactgcaagttttctcagggcatttgtgattgacttctgtgatgttgacatttatttggagttagatgtttaaaaaattactaatttatggcctggtgcggtggcttacacctgtaatcccagcactttgggaggccaaggcgggtggatcacgaggtcaggagatccagtccatcctggctaacatggtgaaaccctgtctccactaaaaatacaacaaattaaccgggcgtggtgacaggcacctgtagtcccagctactcgggaggctgaggcaggagaatggtgtgaacctgggaaggcagagcttgcagtgagccatcgtgccactgcactccagcctaggcaacagagcgagactccgtctcaaaaaaaaaaaaaatttactatcttattgtttctctcattttgaatttgtgaaattattattcattttatggacatactgcatggattctgtgtttcagttatgacaggagatctagaatctgggtggggctgtgagtaaatagaaaggtaactcagtctgtgccttgaggaattccgcagtccagtggaggaagaaagagacggagaaataattaggtacagtgtgccaaaggctataatagaggaggtacaaactcttcccagagaaggcaggcagaatttgaactaggtttcaaggatgtgtgaaggtgaactggggtggggagggcttcccagacagaaaaaacagcgagggtgtagagtttcaaagggggaagcccaggggtataataagtgaaggagacagtgtgaaattataaattttggatgcccttaatgagtttgaacttcattttcttagaaatggagtacttttaaatgttcctaaaatggggacgaggcattgatattcatggttcagttaggtttaggagcttttgtagaagtccttttcaaggtctgcttaatctcatgggccagatagtgacacctcgatgcaagggagcatgtaaatgtgctctattagctgggagcattgctatcagaaattacatttccggctctcttcttaagggtaaaggagaggtaggatattgagtggcaactggcattctgggatgtagaagaaatacagtaccataaagggatagaggaaaatgggtagacttaacgttctgaaccaaagctaagattctccgtgagcgattagagtaggcttttgggatttgcttaccttctcttatctgctagccagccacacaggaagcacatctttgtggagtgacagaggaggaggtaggaaatgctttctcatttttatggtagaaacatccaagagctgagccttcattctggctgagagaactctagatggttcagacttgcattcctgggaaggccttccagctagagtgatggaacaaagcaatgatttctgtggccctgtgtggacagcagtggcagtcagtttactctccctgttggttaactgtctttcgtttgatctagagacttcctcaaaacaattttgttgtgcttgttctttgaaagcaacagcagacaaaacaagctttgaggtttttagaaaagagcttgacactgagcacctcttttgagctagatctgtctgtcatgctgaacctgttttctgtggctgcgtagcttttcaaatctgtttatgcttgctggtgttattgaaacagaatgggaagatctatgcaaaaaggaacattgatcttaataaatttatgtcagtaagaatgggactgccattttaaaatttattttaattccttacctattttcttgttcaattattctaaaagtgattaaatgaagatacgtcacagaaagtatgctttgaaatcaagatgtggggaaaacctgtagttctgagtaggcctgatagaatcatcattgttagagtatttggaggttttgtagtagggattttgtcttcacttaaatatttagttgaaatatgttccaatagtttgacacattacagaatctgtctgaaagaaatgtctaaaatatgattcctcagaagctgctcttggttttactttctgctgttggttttactttctaacatttcattttgatcccgcagttttaagagtaatcaaaaaggccgggcacggtggctcacacctgtaatcccagcacttcgggagactgaggtgggtggatcacttgaggtcaggagttcaaggccagcctggccaacatggtgaaaccccgtctctacaaaaaatacaaaaatcagccgagcgtggtggtgcatgcctgtagtctcagttactcgggaggctgagacaggagaatcccttgaacccaggaggcggaggttgcagtgagccgagatcataccactgcattccagcctgggcaacagagccagactctgtctcaaaaaaaaagagtaatcaaaaagctacattatttaaatcttggcatgtctttaaaaaatgttaaactgtcaggaaaattatcacttctggataccaccttcagaaaaacacatgaaaatttgtgcatgtctcaaatagttgttaatttatgaaaaattagaaagagtgtttgaatgtatatttctgtcatattatattgctcatatttttaaattatactttttttacccgtgaagcccatatagttaagtttgaaaattttaattatattagaatttgaaaattaaataaatctcctttaattcatgcataattttctaatagtcatatagtttgtattatataatttgagaaacttggttctaaaaaaattgtctgccaaagaatgtatatttctgaattctgttctgctttcatacatctgaaaatatttgagctatcataactggctatgcttcaaacccagtctgaaatgggtgacctttgctggctttggattgcagagctgggggctgttgtttgctttatctgatttaaaatagtcagtagtttattttgcaggcagttagatgtatacctttgcataaaatcattgaactgaaaaggttggcactccaagaatacgttgtgagaaaagagaacttgagtactcactctcgactcacctgaatcttattaatattttattgattaatatctgttgtatttttaagtaaataagctctctagaaactatctctgcttctttgttcatttaacatatattaaacaaattgatacagattgcaaaaattagttgcaacgttcctagttagatatcaatgaaataaaaatggtctattcatacgagttcattttagttattcctactaatatcaaatgtgttttaaaaaatgggagattataatctttttatgaagtaagataaattattactttgtatatttaattcaaagaaaacaaaaaggccacaagtgcctgcataaaggcacatccacttaggattattgttaaggcctacagttgataattaggattcaggcatagcataaatgaagtggtatctttttttttttttttttttttgagacgaagtctcgctctgttgtccaggctggagtgcagtggcacggtctcggctcactgcaagctctgcctccctcctgggttcacgccattctcctccctcagcctcccgagtagctgggactacacgttccgccaccactcccagctacgtttttttgtatttttggtagagacagggtttcaccatgttagccaggatggtcttgatctcctgacctcatgatccacccgtctcggcctcccaaagtgctgggattacaggcatgagccaccgcgcccagccagatatcaattatttttagacccaatgatatttgctgttgatttattgttggtgcacaaaataagaaaacaaaagcatggttttaaaacagccctttacacatttaatatggaaatggtaacctacaggtctgtattccatacagattcctgggctcattttatctgtgaattcctctgggcgtcatgcatgcccaggactgactttaaagcagaattatccagtagaggtataataggaccgttagatctaatttaaagttttcaagtagccacataaaaaaataagcaggcgaaattaattttagtctgtcactaaattcaaaatgttatttcaacagggggtcaatataaaagctatttatgaaatacattattttttcatattatgtcttcaaaatgttcacatttcacatatttattttttattttattattactatttttttgagacggagtctcactcagtcggttgcccaggctagagtgcaatctagcttgctcattgcaatcttggctcattgcaacctccacctcctgggttcaagcagttttcctgcctcagcctcctgagtagctgggattacaggcgtgtgccatcacacccagctaatttttttatttttggtagggatgagatttcaccatgttggccaggctggtcttgaactcctgacctcaagtgacttgccgctttggcctcccaaagtgccgggattacagttgtgagccaccgcacctgattacatatttcacatattttaattcagaccagctgcatgtcaagtacttagtagccacagatggctagtggttactgtattggacagtgcagctctaggagagtctcttcaacctgcagctgtctaggaagagaatcatagtttctggaacaggtagaatctataagacctcctttttaagcttctccactttacagatgaagaaagtaatatctggagatgttgagttgttcaaaatcacccacattttaaggatcaagagcccagtccctgttctctaacttctaatctctttcttcatcactttttctgcttcatgttgctgcatcccctttagttactaaggtactaacgttaggttgttgctatcagttaaatattaagccaggagctttaagacaatctggcccacttgaaggcatggcctgatttggacaaaacttgtggggtaggatgaatagagttaccaggcatatcttcaacctctctgtggactagtattatacatatatgagatgatgtagggtccagtgatcagttcatctttttctattgtgagcactgttggaataggaatggggggaccttttgggacccaggatatgtgattctgaaccctgaaatgtcagatgcccactaaaaggaaggggagagatggacctgtcattaccttacacattttattgtctgtatgggtatgtaaacatgtacagattataaggaattgcacttcatttctgggcttctggaaacacaggtattaagatttcatttacctccccttgttttggaaggcttattgtgtgtgtgcccatagttcttacccagttacacttaaagtatgatactttttgacagcttaagcctattgcattcctggcatgtaaaatagttattttcagaatgtaagcaaatgtggaaagcttactgcctgacatggagggttggagaagtgggattggtgttcttttgttgtaaactcatttttgtgaaatatttgctttacaacgtgaagcatgcatgatggatgaacttttagaattgaaagttatttttcatttcattcctgaaatatttaccagcatggatgttgactgagtgctttgaagagtttgcttagtcatataacttaggttttatgattttagatttaattaaacttaaagttttcctgtttgatcctcaggacttctcatctgtggcaaggctttactcacaaaggaaatatcaaccttgaagttaagcatgccctgtgtttctttatattctgatgaaaacgattgaagtttgccagtgctgtgtctgggacaatgcttagaggattcatggcttgtaggaatgagttaaaagtacaaggatattggctggcatggtgactgtcgcctgtagtcccaaaactttgagagtctgaggtcagaggattgcttgagctcaggagtttgagacaagcctgggcagcataaggagatcccatctctatgttttttaaaaaagtgaaaaacaacaacaacaacaaggtacaggggtatctgcgtttccttaggcagctgtcttatatacctttaaccttaaaaaaatccaccatttttaaaacagtgttttctgttgtttttcttagtaaatataaacaataggaactgaagtttagggcttaaaatttttgagagaataatttttatttcagtagcttttggggtacaagtggtttcttgttacttagttgaattacgtagtggtgaattctgagattttagtgcacttaagtagggtaccttgtacctaatgtctagtttttcttttaatccctagtcccctattaccctcctcctcgtgagtctctaaagtccaatatgtccctctgtgtgcctttgcttattcctaacttagttcccacttataagagagaacatacggtttttggttttccaattcctgaattactttacttagaataatggcctccagctctatccaagttgttgcaaaagacattattttgttccttgtaatggctgagtagtagtccctgatatatatatgccacatcttctttatcctctcattagtcagtggccacttaggttggttctgcatctttgcatttgtgaattgtggtcctgtaaacatatgtgtacaagtgtctttttcatacaatgacttcttttcctccgggtagatacccagtattaagattgctggatcaaatggtagatctacttttaactctttaggaaatctccataatgttttccatagaggtggtactagtttacattctgagagaataatttttgtaaaattatgtttaagctagatttggaattgggaaagaattacattctttataggaagcttttgaaaaatatatttaaaaatatataaaaatatgcataatcctaccacccacaaatgtctgtattattatgtcatttctaaaccatttttgagattatgctatagattacgttttagatcctacattttatttcttaacattaaatctcatactattttaagttctttgtacatgtaatgtttactgaatgggtaaatctgtttagggaaactggagctatgtagttgtggacttgtgcttttgttttgttttgttttgtttgtttgtacatttgctttttagaaatgtctattcagatccttggcccatttttttttttttttttttttttgagatggagtcttgctctgtcgcccagactggagtgcagtggcgcgatctcggctcactgcaagctccgcctcccgggttcacgccattctcccgcctcagcctcccgagtagctgggactacgggcgcccgccaccacgcccggctaattttgtttttgttttgtatttttagtagagatagggtttcaccatgttggccaggatggtcttgatctcctgacctcgtgatccccccgcctcggcctcccaaagtgctgggattacaggcgtgagccaccgtgcccagacagacatgtgcttttttatttggcatttctagcctgaacataggctggaagtagtgacttagagagggattgtttgccaaatatcaggtaatattttaattatttattatttattgtaatgctgtgaatcaggagtccctaacccctgggccatggactggtaccggtctgtggcgtgttaggagctttgctgcacagcagtaggtgagcaatgggtgagtgagtgttgctgcctgagccctgcctcttgtcacatcagcagggcattagatgctcataggagcgcaaaccctattgtgaaccgcatgtaagaaagtgagagctgcgttgcacactccttattagaatctaatgcctgatgatctgaggtggagcagtttcatcccgaaaccaaaccacaaaattgtctttcatcaaaccattccctggtgccagaaaggctggggaccactgctataaattgctgctgtcaagtagtgttacgcatggtggtctttaacataaaaaaaaaaggtaatgaacgtacaccacacagattagcaaaaataaggaaaggctgatctagtagttcaaacaagcaatcctcttatttaatggttctgtgattgctcgtgtaggcagaagcttaactgtaagttgttgcatttgacaggcaaatgtagctggagctggaatgtagatattagtgaaattgtgatttcagtttactggagccattcagtgggagcatgaagtgggttacatgattacacggatataaataaagcgtcctccttgccacttcactgctgttaaagtctctcctgatgttatgtggtgaaaaacaagtcaaaaacattaattctgtcaagtttccaaagatataagaatctttgaccagaaaagagacggtatttatcttcaaatttaacaaattgtgatgaaatgctgctgttacagaacctagtgtaaggtcgtggagtccattcagccagacacatgtaattttgattattaactgccgtttctgtggtcagtcggccagttttatatatttcacattataggtatttggagcaaagacagtgttgtttattgtttactttaaaaaaatacaatactgtaactacataatgagtaaatgttgatactgttgaaaactaataaaaacaaattcttacactatcaacatcacagaaattctaattgtaagaaaatattgatataatatggaaatccgttcatttatttggtgcattaattgaacaccaacactatgccaagcattgggatacaaccatgaaagaggccagcttcctgatctcacagagcttgtactttgttgggtggggcagagagcaaatcagtcaatctgtctgtctgtctgtctatctatctgtctatctatctgtctatctagatgtcaatcagtatactctgtgccacttggtggtcagtgctatgaagaaaaattaagccagtgaggagctggatagagacacagtctggaagggtatgaaggggatcagaatatgctacccccaaatatgccatttcagcaaagtactaatttgagctgaagacaatcgagaaatagcagacccaggacaagctttaccccctttttataaaaattttgctgtgtgaaggtatcctccttcccctctccatccctggagagaccactagaggtggcaccatcgcctgcagaaacaaaccttattgaaataacccttatcttctattagtttcccccatatatttaccttaccacacttcccctggaagccctaatcccctctcctttgtcttgtgacttctccacagtttattgctctttgttaaaatggtgtgtatgctctcaggcctaactgcttcttttgggtttttgcttttctgtggagctccctcctctcccctccctcatgtaaaaataataacattaaataaaatttgtgttttttcccctgcgaatctgtctcgtcagtttaattggcaaggcctcatgtgctgaacctaacagggtagagaaaaaaggtttttttccccttttctacaagtattaaacctggagagaacaatacagtgtaaaggctgtgaggtgggagcatgctggggtgttggaagaagcacatgagcttacaaacattccatcaatttgcattcattccaaaaattgtatgcaatttttcagtgacgattcccattgatcaatcatttataaaaactaatggtgagggtcttccatactcagtttactcccttcttggaaaagaatgtacattttaatcaagatgatttcatgaaagacattctgtactccaaacatttaaaagagcgtttagagtatacagcaattcatcttttcttctgtattttaaaatttaagacagggagaattattgtattatacttagttcagatttggtggtggttttgttttttggttccagtgaaaagaaattgcatcagtaacctggcggtcaaccgtgccatattgtttgtgatttattagtctggaaaaaataactgtatttctggcatatgtaaaaatagtttgctgagaggcctccttggttgtggcaatagtaatactaattaccaggtactgtatgtagctcattctatgaaccaggccttgttgaaaagtgctttcacttaattttttcttttcagcagcctgtgaggtacctactgttatccccagctgggagggagctggccagtggactgggtttaaactatgttttcattgtctttactcttaaccacttatcttctctgcctccagcaaaataagtcaaagagttcagccagtgtttcttcttggactaagcagtcagcctcctaagtaagcaagccttggaatgcaattgattggtaagatactaaagtaatcagtaaggccctcagttcctggctgccagcttctttcaccctctcctgcaggaagttctgaatgctgatatctctacttggtgtcttctctccccctcccaattccattatttccctttttctcaatcccaagtgaaggaagttctgagtgtggatgttggagtcattcagaccttggatctgagtcacaactctttcaatttactagaaatatgactgcaagaaaatgatgtaagcttccctaaaccaatttccacatctacaaagtatctaaatagattgcttaggagaaaaattgaattaaattgaataaagtgcaaagcacagaacatggccaggagtaggccctggatgaatgagggaaaaatggttctgatttttatttttgagcctctttgtaacatttgttggccccttcagaataatccttagagttcatatcagccacccttcatccctcctgggatgggccaggggagaggcccagttgcctgtgacactgcttcgtttcacatttcactgctttagcatctcaacatttcattgataacatttttgatgcctgaaaacagaataacttatttgtaattctacatacattttgtttgtgatcaagttgttagagtttgaaatgagcctcatttccttgggttttgtccctccccatctgaccttcctcttctcagtgaaccctgaagaaaaaacactagcaaaggaatctcaagaatgttggttcgggacacagctctctccatctactctcctgccctagtcctgcccctccttgtgttttcagcggtgaccaggcactggtgacagccttggctgcttggaccagctggaggtagctgcaaaatgcctgcctgctagctttgaaaaatctctgccaacctcattgaaataattgtttaccacatatcagaggggactgggaagtgggtaattgagagatctttttgaaggggtttgtggcttctccacttgcagaggcttcctgaaatggtgggtaatgctcatgcctcagggagaatcaatatccttctcctaaaacctgctcacacgtagctctaagtattagacatgcatttttgttaacattttatcagtgcatttttctacctgtgtcatttggaccttagattcgggagaaaatcactgtgtatctttggtggtttcaggtggctcttaaatttcattaattcacaaaatctgaattgaatggaatagtctgttttgggaggtttttttgggggggttggggagggattggatttttcagtccttccaagagacttcaggttttttttttgatgttctgattagcccggtgtgtgtaaggccctatcaggtgttcgcctgtgtgatcctatcacacccacatcctgtagctgcatccaagtgctttgaggccgacttaatggggattaacttaacagttgctctgtgggaacagatgctctttgccgcttatttctaataaattgattgagccatttaaaagattttttttttcttttaagttacatcttcttaagaaactgtagacaataaagcaaaactaaaatacttgggtctaaaattagtgtattatatttaaaacactgggcttcagactgattatatcatgctcttttactgactttctagtcagatgcttatttataaaaataaagcttatataaagggcagcattcaaatgttacaccagtcggttttagcagtttgaccttccacagtagctaaatattttttacactgagagaagaattctttaacattatatgctatcagcatgtcaagtgaattctgagcttgcatgcaacagatgagaccctaggtggaaacataaaaacataccagtgtgaaagagaaaagcaggctctctgtctttgggaaggagttctgcagggaggggtgtttataagtgtagtagatacttaggaaaattaatacaattattataaaagtcatctgggaaaaaccattaggtaagaatagccaataaaaaaccagaagcaaaatgtaaagatatagaaattaaaactgcacatcccatgcatagataggtcaatggggcaaactggaagtctagaaataaagttgtgcatatattggaaattagtgcaagataaaagtgtctttttacatcagaaaggggaaagatggattatttagttaatggtgttgggttatctgactgtacatagaaggaaggtgggtaattatttacccagtaccaatactggattacctagtattatgtacccagtacagtttgtcagcaacaaaaggcaaacttttttattccatgaagtgttcttacaaatcagtaagaaatactaaatatgaacatcttcagagaaaaatgaacatttttgaaaacttattatgaaaagaattaaacatacacaagagagaatagtgcgctgaatgctcagcaatgatcagctctcacccagtcttgttttatctgtattcccctttctcaacctgctcaattctcttttccctcactgggttattttgaaataatttcaattctataattttatgtataaatatttcagtgtggatgtctaacagaatctctattagacgtggacaaaaaaggcaaagaattttatagtacacaggaaaaaatacacagccaataaacctatgaagatatgctcaatctcatagtcgtcagggaaatgcaaagtaaaacagtgatataacattgttttttaaaaccctgatgggcaaagactaaaaaggcttgccagattggcattttcatctactgtcaattgataacagatatttctttgcttggagtacagtggcacagtctggactcactgcaacctctgcctcccaggttcaagtgattctcctgcctcagcctcccgagtacctgggattacaggtgtgagccaccacgcctggctcattttttgtatttttagtagaagcagggtttcaccatgttggccaggctggtctcgaattcctgacctcaagtgatctgcccactgcaggcatgagccgctgcatgcagctggtacagaaattttttagatcagtcatttagaattttatgtacatatcccttgatctaggaattctagaaactaattagttcatagtatattgtataaatgcgcacagatgaggatattatgagagcattatttgtatcaactaagcaagcctttaaaaaactcttatacagtagaatattatgctgatacattaaaagtgggcataaccatactgatgtatagaaatatctaaaatcataccgatataagtgaaaacattcagaatgcaggcataatcacagattaaacagtaatttatataaaaaacagaaaatttatatgtgtattatgtcagtagcagattcaagtgaatctgacaaaatctgactctgggcaatgagaacattggaatggaggagaaggtagtacatatttactttgtatattatcaccttttgtactatttgagtctttttaactgtacgcagatactttagagcaggggtccccaacacccagccatggacaggtactggtccatggcctgctaggaaccgggccacacagcaggaggtgagtggcaggcaggtgagccagtgagcattactgcctgagtgctgcttcctggcagtagattctcacaggagcacaaaacctattgtgaactaaacatgggagggatccaggttgcctggtccagtccttgtgagaatctaactaatgtctgatgatctgaggtggaagagtttcatcccaaaaccatcccatcccatccagtctcatgccatcccacccccaacaccccatggataaatggtcttccacaaaaccagtccctggtgccaaaaaggttagagatcactgccttagaggctgctccctcttggcacatcttgaatgtaggactccttggttctgccattcctggtaggtagtcagccagcttttgatagttctccccagagacttcatcccacaggcaagccatcccattccacgtaaaacatctctaatgttaggaaggcacgtattttgatgtgatatctagaatcctcccagctgttcttcagaggaacattacttttataaagttgaaaagaacgttttattgtattataaaactaggtcatttcagtgaatttcatctattttcatgggtaactgattcttatatcaaaacttgcttttgaaagtactggaagcataaattattacttcaggcccatttgctttactttgttcagcacattgaacatcaaggagcaactccctcgatctaaaatttctagcattggtgcttgtaatatcatttttcaagttgacattaatgctatctttggaattctcatggtaagtcagaagaaagcagtttagtggaactgttctttctcccactgaattgtatactgagatctgttatattttctgcattttaacccagaaagttgttcaagagaattgaccatgataagacatctgtagcttattttgtatttttttaatggaaaattgtaactgacttttaaatttaagattgagtgtagcctttcccaaaccaatagctaatgtttttataactatttagtgtaggagattataataaaatccacattgcttaagatataaaatgtttgtgcagtaataggctgtataaaaacagtaaattgagattgtatcaggaataatgtattataaaccatatatgaaaccaggtactaacttggtattctgcatagctttatcagaaaggcagagcaaatactatctcaaaatgaagtataaacaaaatgaggttcagtgagtgatgtggtttggctccatccccacctggatctcatcttgaattgtagtccccataatccccatgtgtagtgggagggaccaggtggagataactgaatcatagaggcggtttcccccatcctgttctggtaatagtgagttagttctcacgagaactgatcactttataagggacttttccccccttttgcttggcacttcttcttcctgccaccatgtgaagaaggacgtgtttgcctccccgtctaccctaattgtaaggttcctgaggcctccccagccatgctgaactgtgagtcagttcaacctgtttcttttataaattactgagtcttggatatgtcttcattagcagcgtgagatcagattaatacagggaggctacataatttgacccaagtagcaataaacaataggggtgaggttgaaatccaggcccctggtacttatggccttaagctaagtgaaataagccagacacagaaaaacaaatactgcatgatttcatttatatgtggaacctaaaacactcaaactcatggaaacaagagtagaagggtggtgttaccagggtttggatgtgggggaagtgaggcgatgttggtcaaagggtgcaaacttgcagttatgagattaatacctaatgtacagcctagtgactagttaataatagtgaattgtacacttgaaaacgtctgcgagagtaaatgttaaatattcttaccacacagaacaaaaaaagtaactctgaggtgatggatatgttaattagcttgattgtgataatcatttcacagtgtatacatatatcaaaacatcacgttgtatacattgaatatacataatttttgtcaattatacttcagtaaagctagggaagaataaaagaagtgacctaaccaggacacctatctgtagctctatggtaaagccaaaagggataataacttttgattatcaaaacttcatcatcattattattttttaagactgggtcttgctatgttacttaggctggtctcaaactcctaggctaagtgatcctcctgccttggcctcccgacatattaggattataggcatgagccatcacacccagccagttttgaaggtatctttattacatttttttgtttaaatatttaatagtaagtgtttaacttgaagcatttttttctgccttaaaattgattttcccactcattttatggatcaaaactattatcagattttaattcccactccaccacattgtttataaaagttgacaattatggaaagtaaagtaatactgaatttttctaatgcctatctttgacatggaataaagattataaaatttcttataacttgaatgagtttttaaaaattggacatctttttataaaaatctagcattgaccatttcaacataagttttacttatctctgaaatacaggtagtacctatttttattaattttcttaagtgatgctgagtgacactatttttgttttttttcactttttctttacgttttttttgagacaggatctcagtctgctgccaaggctagagtgcagtggtgtggtcttagctcactgcagcctcggcttcctgggctcaagcgatgctgccacctcagcctcctgagtagctgggactacaggtttgcaccaccaggcccagcagttttaaagattttttgtagagatggggtcttgctgtgttgcccagactggtcttgaactcctggcctcaggcgagcctccgacctctatctcccaaagtgctggaattatagacatcaaccaccgtgcctggccccagtgacactgtcttaattttgaatagggaagtatctaatggtattaaaatggtctggcagagaaggggatatgaggcttggtgaaaataagcacaggatgcaccatctttgagtaagtgttagtttctgcagtgagccagcagcaacattcttagcagagcctagaaagatcgagtgagggctgtgtggtggtgcagcctcttaagtctctctggttccacaacatgctcagattggtggctttgatattttctccatccaggacgcattgtgctaagcttagggaaggtccagtggatatttaccaagcctcttatactgccccgcatgttgccatgagacagcagcgttatcaccttaaatggtgcaaatactccttgtgcataccctacccctgagatctaacatctggattctggatactgtttcctattcttccatcttgctgcatggttcccaggttatgtatatagtgtggctaggcaccacacatggccctggctccttgcagccatacagaggtgacctaactggatgtaattgggtatgtaccgggtgttggctacctgtgcaggttgagggccttccacaggtctagcaaagcaattcattgcctttctgaatttttgaatgcttcatttgtgaaacccttgatgtaataactgttgatattatttctttttgaaaactccccttactcttccctgtttcttcatttgtaaactggaaccgatagaaaagtaccaaacttagggttgttgtgaggcgtaaaagaaataatacagcccagagaacatagtatatactcagcaagtatttattaatatgactactaagccagcattggtgattgattggctcatagtgtcttctatttgccagatgttttcagaggctctgttcatgttcatacccatgtttgtaaatgacagaatgtaaatttcttaatcctctgtcttctcctttagcatcagctcttgtccccaaagtaaaagaactcagtcatccagaacccagttttgtagatctatttttcaaaattgggcagttaatagaaaattaaaagcagtctagggaaaagcctttcctttgggtttgttgctttcttttctgtcataataagactgtgcccaaactgtagggaaaaatcaagaaactgtaaaatacatcatcagggtgtttatagtaaatgtaaaacgttaagtaacatttgagttaatctgtgcttgtacaaacctcagaagcttaaataatgaaccaatgacatataatttagaaagttttcattagactctttgcgttggtatttgcaatatcagatttgcatgtcatcattattagccttcctctattttgagtgttgactaggtgccaggcgtcatgttgagaaatttatgtgcttatttaattctcacactgactccatgagatagatactccattttacagatgaggaccccacatcataaccttttggccagaattacagttagtgttagaatttaaacctatgcagtctcattccaaatcctctgtctttactcctccagaatgctccattaaatgaattgtttcttataatccggttgttttaacgttggaaaagaacttgagaacatttagcccaaccaccctatgaagtttggcagtacttcttgccattctttcaatagataatttatttgagtttaagggagagtctatgaattaacactagtaccaaaactcccatgagaaaataatgtagacagcttttgttaaaaaagcagaatttttaaaggtgttcattcagttatcttcttgcctaacaagttcctgtgttgtgatagactttgaatttgttaaatatgaattggcttcctgattctagctgttttgccagaggcctgatttagagaagggattaaaccactggtcaaccttggatggaatttgggccagcagttccttctccacagcccctgacacttggctttgtgccaagaaaatcctacaaaaggaaattgatttactctacccaagacagagttccggaggctttggttgtccattgttagcttagaagttggcgcagtgtgcgtgtgatccacgcctaaatagcacagccttgctgtgcgtggtagaagttgggttagtgttgacatgctgttgactcaccctcccgaggatggaagctctggcctgggtcaagttgtggtcactgcagttaacagtttgttgatctcagggagtattccacagttgctgatgtaattgacaatgattggagccagctcttccccagattcaaatggaccaattagaggacttgttggttctgtttatcaactatgtaagtgagtactgtgaagttggcattgtttttagtctgtatttgggtaagatgaaactctgttctcagacagtaatatctttcaaaagtacaatgttacttattgtgaccaaagtagggatgaagtttgcaaattatttggtgtaatgatttaatttggccatccatgcagtgcagttctctaccagtgtgattgttctctttgtaaaatactcttactttgccagaaaattgtttgtttgtttgtttgtttgtttgtttgtttgtttgttttgagacggagtctcgctctgttgccaggctggagtgcagtggcccgatattggctcactgcatccttcaagcaattctcctccctcagcctcctgagtagctgggactacaggtgtgtgccaccacgtccagctaatttctgtatttttaatagagacgaggtttcatcatgttggccaggatggtcttgatctcttgacctcgtgatctgcctgcctcggcctcctaaagtgctgggatacaggcgtgagccactgagccctgttgaaaattcttattaataagatgtttctcatagaatgtttcaaaaaattgtgactggtttcaaaatcagatgatttgcaagaattagccatagtataaacacatagttctcaaaccgttttctgggagtgggcccagagatctatttaacaaaaccttgagtagagtctggtgcaagttaaaattggagaaccactaatgtaaccttaccttatctgtggaccacattttgagctttggaagaaataaccctttctatccttcacaaggtaacagatgatttttttgcacaattatttgataatgagcttatatttgagattaaggtatgcacacgataatgtacattctcactctaggtctggggaccttgattctttgactcttctgtccttttctctccagttacttggttttgtgcattaacaaacttttcaatttacttatttttttttacttatttacttatttctcatcccttacgtaatgttgcatcattgttttttgtagcctctgcagttcaagatactaatcacccctttctaccacattaaaatacagactctacctaaaatcatgtatgggagtaacttgatatatacgaaagtgtaaccgtgtcacaattccccgccccaccccgccagtctacataaaactgcaaacactttattgcttaccaagaaagtagacaataatatcgaagaaagccctccttttcctcttctttgaccaacaagggagcagttcctgacaaatgtcagtttgctttttgagttccttaggtttctgtgttgtgtttgcaatggataaatattgagtaacaggtactgactgtattgtatacattgaaaactatccaccaacagaatatttgcaggaggattttgttttgttttgttttgttttgttttgttttgttttctgagacaggctatctctctgtcacccaggatggagtgccatggagtcatcatggcttactgtagccttaacctccttgtctcaagcgatcctcccgcctcagcctcctaagtagctaggactacaggagaggaacaccatgcctggctaatttttttttttttttttgtagagacagagtttcgctgtgttggccaggctagtgttgaactcctgggctcaagaaatctcccaaagtgctgggattataggcatcagccactgtgcctggcttgagaatgacattctataagtagtttcagtcccttagtttaatcccatattttgatcctataacatgtacaatatttgtgtatagtatatgatctgccaactctctaagaagattttaaaacttattatgttaaatttcagacatatacatcatccagcttcaaaaattgaccacattttgctgttcttgtttcagcacctccccctgccccattttcttttctgaagcattttaaaataattctcaggtatcatatcattttacttctgttcataggtttctgaaaggatttgatgcagaatgttattattaaaccagtatacagagagaaaggccactggatattagtacatgttttggtttcagacggtccttttaagagtatattaaatcacataaggattttctgagtacccattagaaccacaaaaaatacctatgatacccttcttactgcagtagaagatgagtttcctagggtagccctttgttgatggaacaaacatgtattttgtttcatcaggaaaatcattggaacagccatgactcagatccactaaatgaaggaacaaaaataggacctgcctcacctcctgatttttttttaaatctctaggatgagtaaccagaatatttttatgttgtgctaagtaggtttgtttgtttgttttttactctgacttatattatttgaattgtagaaatatattgtttttacttttttctttaaaattctatctggagtttctaaatgagagattgtagctcctaaaacctttcttagttttggtgtcttgctttctgttcttagcgtctgtggtcatttctaactcccagtgaggaaagagctctctggtcttgtttctttgttaaatgaaggagcaaacctccgtctcgttgatccactcccaacccacttgttttgtaacaatgaaagttatctcatacttaaaagacaacttgaaattataacacacctgtaacaaagtaaagggtatgggtttttacttaggtttaaaaaaagggcagtaacccttttcataaaaaagcaaaatttagatgggatagaacccccgtttataggaaaagattttaaaatctcatttgctctcattgaaaccttaaccttctctcaaatactggcgcacctctgaggaacttcaaatacggtttgaaaactaatggtttaaggagggccaggcgcagtggctcatgcctgtaaccccagcactttgggaggccgaggtgggcggatcacttgatgttagcctgggcaacatggccaaatgctgtctctactgaaaataggaaaaattagctgggtgtggtggcgcatgcctgtagtcccagctactcaggaggcggaggtggaggcgggaggatctcttgaacccaggaggcataggtgcagtgagcagagatggatctcttgaacccaggaggcataggtgcagtgagcagagatcgcgccactgcactccagcctgggtgacattgagactgtctcaaaaaggaagacgaatggtctaaggaaactagtttgtggtttctcagcggagaatgacattctagtttctacagatctggcaacagaagacaggcacataaactggcctgctttggagtcagggccaagacttaaatccagatttaaaaccagctttttttttttcttcttctaaaacaaccaacctgtgttttaggtccagtgtctgccttgtaagttgctcaaagctcagatacaaggaagtaatcagcacacatttttgtgataacattcctgaaaagaaaaagatgaggtggactaaggtaaatacactgctccttaaaaatccatatttttagattatttataaatcaaatgggcatggttaccaaagatgaattctagaggtgtaaaactccagtcttatacctcaaatttcagttttccttagggagcaaaacacttccatgatcttactgaggacctaaaaaagcctgtacatattttaaaaatagcactccctagataaagcctgatggatccagggtacagtagaatcatgaaattgcctgtttctttttaaaagatgtatatgattgctcggtggctgtatattgtccatcgtgtgcgtgcctgtgtggtatgttggttctttcagagaggcagtggcgtgcagagtgagaggatcacagatgtgtatgtgacaaaactatttcttttctttcttttcttttctttctttctttctttctttctttctttcttttctttcttttcttttcttttcttttcttttttcttttttgagacagagtctcactctgttgcccaggctggagtgcaatggtgtgatcttggcttactgcaacctctgcctcctgggttcaagcgattctcctgcctcagcctcctgagtagctggattacaggtgtgcaccacgatgcctggctaatttttgtatttttagtagaggcagggtttcactgtgttgttcaggctggtctcgaacttctgacctcgtgatccgcctgcctcggccacccagcgtgctgggattacaggtgtgagccaccgtgcctggctgacaaaactatttctaaaacacaagtccagatattcctaccaagggctctctggggcttcgttttgatttatatgcaaaacactcctaatgtggtgacattggggagataaagatctgggatgatgagagagaaaggcaggtaggacacatgcccttccagtaactttcccagctagggcttgcatttaacctctgatggaggcctcaccatccaggcagatgtacttgcttaggaatgagtttgagataataaggctaaatgtgctgccttctgtatataatttgcatttgtcctaatgtacgactaaggaaatgaaaaatcaaagtttgagtgactaaaataaaagaggtctgtggagtaattggattgaatttgcaccaagtcaaggagaaaacttctgtattttgtatgttttgtcatggttctatgattacttgttagaaagtgatataaaattcaataacttagtttgatatgaacttggctatctttaagttatagaagtcgtgcatataatgtggctgttttcaacccccataccctttctgagtggttggagatgtcttgaatttcgaagtgagaaggtctggtgctgttacatagataatcatgttagccagctttaccttctgataagctctcaatttaagaaagtacttctaatcctggctttatctttggcttgctatcttattatgcacagagcataattgtaagaagggaataatatctcttgctgtctattcactaagaatagtgtgaggacagggctcttaaaaacatgaagagatgggcactattgtatagatatagagatttgatgaaatgttaaaatgttggatgattttaaatgacaagtggagtggtgagaagtttatttttaaccttatgtggataccttggatatttagaaacatcgaagttttaaggaagaacaaatatcttgactccaagaaaatggtcatgtgatactgtggcatctatttggtcttcctgatgtatatgtttcctgacatttagctcctaaaatccttggaatctccagtgctaagaaggtcttatatgctaatgagatgactggtggctgggtaacctaccatgtgattagagggttaggactttcagtcaccctccccaacctccaggagctgaagtttgagttgataaactaatgatcaatgatacctacataatgaagctttcttaacaaccctgaaggaccgcgttctgggaacttccagatagctgaacacatggaggttcctggagggttggatgtcaggaaagggcatggaatctcgttttctcttcagccgcacctcaccccgtgcatctcttccatctggctgttcatctgtgtgtcctttgtaatatcctttaaaataaatgggtgaatgtaagcaagtatttctcttagttctctgaaggtgctccagcaatgaatcaaaacgaagtaaggggtctggggaatggtagccagttggtcagaagcacaggctacaacctggggcttgtgattgacatctgaagttgggggagttttgtggtactgagccctcagcctgtgggatgtgtaatctccaagtacagtgtcagaatccagttgaattagaggacactcagctggcatccattattggcatgcagtattccttgtcatgagcctgggcaacatagggagacctcatctctacaaatatagctgggagtggtggtgtgcacctgtggttccagctactcaggaggctgagtgggaagatcgcttgagtccaggaggcaaacattgcttctcctccaaatgctgtactttaacatgtttggaaactcctgcaaaggaatttcaacataagcgaagtcaatgggttataaaggactgaatgccattttgtaaatgtcagaaatcaaagtcacaaccaagttaagttctagattagggccaggaagagaaatgtattatctggtcaaccatatcaaatctgtattttggtggaagagcattttcttatattggttctgattggtttgatacggacagggaactgttttctttattccagttatttgttttgttttgtttctgagacagagtctcgctctgtcgcccaggctggagtgcagtggtgcgatctcggctcactgcaacctctgcccctcaggttcaagcgattctcctgcctcagcctcccgagtagctgggattacaagcgtgctgtagtttttgtatttttagtagagatgaggtttcaccatcttggccaggctggtcttcaactcctgacctcatgatcccacccgcctcggcctcccaaagtgctgggattacaggcatgagccaccgcgcccggcctattctagttgttaatcagttaacatagccaaaagatatagaataagattgtagactgaatccatagtctaatgatttgtcttcctagtaattgtgaataattcagacattcaaaattagtctggcatcatacaaacattagactagtcctaaaatgaggatattggcaagtgtgttaataaaaattgcatatgcagtattaataggttccttacgtaggctgccgattactcaggaactgtcagatgttttgttttgttttgtctttgagagatggggcagggttttactctgctggagtgcagtggcacaatcttggctgactgcagccttgacctgctgggctcaagcgatcctccctccacagcctcctaagtagctgggactacaggcatgcaccaccatgcccagctaatttttgtatctttttttagagacggggttttgccatgttgcccaggctggtctccaactcctgagctcagggatctacccacccatgcctccctaagtgctgtgattacaggcatgagccactgtgcccagcccccagatttttaatcttctctttgacattgagtttcagaaatgaagtataaatggtgaatttttagtgtagaatatgatgcactaggaagatcacttacccgtttattcactttcttagaccatgtcaacccgattctgaatttagggttctgttgtgatggtgttctttagaagtgattttaacactcaaaatactatagtctgtaacataatttactgattttttaatttttgcaaactaagttgaagtaatcaagtatttatgagttctttgggtgagaccatctgtcaaagaattctgggcttaatggagatacatatatgttgtgaatactaaacagatatccaagtaataaagcagaaatcatatgctgtgtaacagaaatgtaaagttctgaattagttcacgagtaggagagaaacttttttttaaaggtagaggagaactaaaagtaatttcttaaaagagtgcctattttacatcttgaatattaaaagtctaattcagtgccttgggatcttgttctttttgtagattttgatttgaatgaacttcagtttgctgaaatgtctaatgggtgcaaagtacagatttaattataaggttgagctaaaatcagaatttaagcatatggcatatataataccaatttaatctttcccccttaaatttagttatttttagtgagtcccaaacaccatatttgagacatcacttttttcttttttaaagagatagggtctccctatgtgaggctggagtgcagtagctattcacaggctcgatcatagcaaactacagccttgaactcctggccccagtgagtgtaatgtctcaccatgccaaagtacttttatcttaaattgcttatttttttgtttatttttttaactgactctgtttacaaaattaaccttttatctagtgacagctagattgtatcacatttgtcatctatggacaactgatttttagttgtttaatatggtaagtttattattgtttttccttatttaagaaaacaggatctgagtgaaaaaaaaaaaaatcttaattcaactatcacgattccagtaggaagtagacagacattcatctgtatacattaggtgtcaaagtagagttttgtggtttatcattctgaagatttgagattcaagacatgactatctttcagtcatattgtgcaatagataacatataatgtttctcactgatgagaacagttggttagatctgccacactgagcgtgtagctggggttgacgacacacgtgttgcagtgtcgttaccagtttgtctcttttagagacaacttggcaggcagacgtcttgcagataaacaaggaaagattgtctattttaaatggcataagacattctttaaaccagtgtgtcatatgtggttatatagtcagcattttctttagtgcaggaaatcctctctcagggttcctgaataaatagcaggtatctttgtagggatagctcgcaggagatttcaaatgctgtgtattcatcagttcaggctccccagatgtcttacgaacgtgctcattttagttttcttttcttttccctcttcctgctagatacaagttgagacaatatgattagctcttaaagtgcttactctccattttatgtatattactgcattttaatcctcataatatcctgtgaggtgggatgttactatgtccatttgagagataaaggaaatcaagaggtaaagttaactggctttctccaaacagctggtaattactaaatacagaattgacttttgccttttgattccaaagatcatattggtactttcatgtgtgggtcccttcagccagttcctacagtgaccctgacccagctgtaagtcccctgaggtctctagagatatagacagtgatggattagaccctgttcatagttgcagatacaagacatagagaggtttctagcaataatttttttagttatatattttcatagggcttttgatttatgtaacctattagtatatatttgttattccagtagagttaatacattattcaaagagattccagtttttaagccttttctccgtttgtctaagttgttcattatgaaatgattggctagaatttgaaagtctttacctacagagagattctgactggcttgcttggtcttggaaccctagttatgagtgcattgtcttgcttcctggtgaactttgcccagaaatagttaccacctcattttttttttttaaatgaaagctggataattaaccctcaagatttcttaattaaaagattactattataaattgacccacagggagttaatacaataaaattatttttgatcattttatatgaaataattatggggcaatcttctgtaatcttgagttgaaggggttatcttgcttaatgttaataacttttgatacaccaactaccttttaaaaattaacgttttttttttttgcttctgtggaagggaggctgtattttgtaggatttacagtttacatagttattgttttatatgatgtcagttggattaattatgttttgagtggaaactctgtttggttcaaccaatatttgaatgctaattttgttctgtgaacaaatagaaatacagagaacagtaagacatgactctttccccctaagtaaaggcttaggttggagttttcaacctgggaattactgacattttgagccaaataattgtttatgttgggtgggggagggcctacagcggaggctgcctgtacattgtaggatgtttagtaacatccctagcttctacctactagatagatgccagtagcaccacccaagtcgtgacaatcatctttgccaagaactttgaacctctacctagaaacagttcatagggctcaaaaagcaaagtggcctaggacccatgtagttaacaagcttaccctgttggagaaccactgcatagctgaacaacatgggtgagactagtgtcagggtaaaggagctcttgactggagattggccgtacacagaaaacaaagtgagtgttatggatatttggggatttaccttcattagggcacagttggttagcgttaggtgtacaccaacattattccctctttagaaacagccatgcacgtaacattttagcacatctgaagaggcacttctattctaattacctaaaattcttattatctagaattacatgctatgaacaacagcagtaaagtcagaagccagaatctatgtgatgttatctgttttgcgatcacagttgtgttcttctcttagtttatttgaacaagtttgtgaaaaaatttttgtgcttatgtaaatactctttgcttagattttttggtagaatgtaaatctttcccacacagtgcaatacccctcctgcccaagggcgagatatagattgtacagtttgttatttctgtgttttagggcttattcctctgtagacatgtcaaaaagacatccgtcgggggtaaggaatgcattagcaattcaagctgataatctgcatggtgagagtccagataattttttccccaggtcacataggcagctctgcacaagtctgttaaacatatgctagttttgaaaattaaaataagttcccatcactcaaggcaatgaaacgtagatgaattgctctgccagattgactcttagaactcctgatgtgatgtggggctagacagaatgggatgtttgctaataaatcagggaggtagtgattgttttccttctttttctcccccacccccgtcaggacaaactcacattctgtagcctggtgcactctaataatgcctgttgaccttggccatgaaagcactctagactcaccccctaaacaccgcaccgaatgtgctcatccttgaaatttacaagccttagaatcttccctacctccactcctgtttactgcctcctgttactcctggtgcttccagtcagaccgtagtcttggctgtgcagtacctttaggagccctcaaaaatgtttaatttcttttaaaatcagaaggaaaaataaagaacaagataataatcatgaatatacaataatgaatccagcctgacttagagttgtctttataccaatcaacagagccctaaaatatagcttttaatgtttttttaagagagaaagaggcccacgaaagttgtcctggggcccccgcatcctcctcatacactggtgggatgctgctcttgcttgctttggaatgtggcagcagctcccagtgacttcacacgtttattacaaattcaaggtcatttggacgctagccttgtgctacctttcatgcttcctgtccgacccatactcagcctgggcatgttttctgctctgatctttggtctgccttccttctccttctccaagtcaaaccagtcactctttcctgagagctcttcggtgtacccttgccagacctctgcattaacactccagcacctttggttagccaatttggccttatttgtgtctccaccattggattatctgtccatcaaggtcaggaatgttttcgggttaccccactgtccccaactttgaatatgttcactgcctggaaaatgtttatctgaatataaggcatcaagccagaacttgcccaaaacttaacctaggactcaaacagctttgaaatcttatctgtgtagagtgggaacggcatgtgtttgataaccatcagcatttgctgttttgcttagccatcaacaatccgtttctatctcttcctcatagtattttcagctgtatttttgtacagcagtcattcacgttaggtgttaggttacactgaaatctctgacaaccagttctgtgctactgaaggcttttagcagcaggattaaaaaaatagttgattgcacattcgaagtctcactgctcacactgtttatgtaattcttggagtccagttagatcatctgatttttaaaatgttgcctgaattacaaaggagttcaggaatgtgttatcaaagaattaggaaattaacattgaaatttattgagcaacatagctaataggttgtcttgctttttaagccttcttgttttctaggaggagcctgaagtccgtggacaagttgaactgtagctggtatttaggaattggtaaagacagaggtgtggatgctatgttttcttttctctgttaggaaattactctcctggtgccacaataaaaaatttcacaggtatctaaagtggaatttattttgtattgttccacacctttgtcaataattacattttctaccttctagtttattactgttattatttttcatgccaggtgtttcttaattgttggcataagtatttattgaatgcttatatgtgggagtgagagagtcaggccagtgctaaagagtagggaataacccctagacagtgaagtaacttttgtcttgtttgcacattaaaaaaaaaaaaagattaggaatccttgctctatatactagaaatgtttgatgttctcttttcttctcttcaaacagagaaaacttagatgaatacttataggctctactgtcaactaactgcaccctcctaatattggcgtctgcatatttttaccattgtcaatatcagattgcctctgatgttgtgtcactgaaactgatagtaacattacatccaagagtaagactgcagtgtgatttttggctcttggtcttctgttctttcggcaacaattttttataaatatagtcaagaaaatagaaataagagtcttcactgctacctccccttcagaattattttctcctagtattgtggttcctgatagcctttattcctatagaaatggcaattcgaaaaattccttctgtgaatctgagggctctacaaagggagagcttctttgatagtgctttggtgtaagttatttaagaaggacaatctacccaggcttatcaagcaaataacctggaatttaaacctggagtattctttagtgttccaagtctgcaggaaaagaagtaatcttggcttaaactaaataagttaacagaatacaatttgaacaatgaacaagaatgctgtttgaaaattatcttgggtttttatgtcaagttaatattctcactgaatttctattatgtttgtaaagcagctttctcctagaccaaaaatcctagtaataaaaccacaacagtatgagagttataagcacacagtaaaggctgatgagtaaatgttatgacactttgaaaggaaataaaccagacgatataatgtaaatatcctttgtgcttatcaaaaataagtgacttcatgttctgttcctgcaatatttctgtaaatctgctaaaaatagaaaggtaaaggtctaagatcataaatctctgatgccctttccttaaaagtaaggaattcttgtcttggattcttatataatatacttatttataatctcacttgttctgattgcaggtggcctcttactatctttacatccatgtgaatgtgtgtgctttgatgtgtacatatgagagacaagaacaaaagtaaatgtcaaatatccgaattcctgtttcagtgagctttcacggagtaaattctttttgtctacttgcctgtgatctcttctaatatgacttgcgttaatgacctttaagaaatcttttaataaaataaaaaattttattaaaatcttttaataaaaaaattttattaaaatcttctaataaaaaattttattaaaatcttcttcatacgtgttacttgaatttactcatggcaaggaccagttagtaccattttatgaaatcacaagctcatgggcttgtgataaaacatataagtgctttaaatttggcattggtaacggcaggccgactcacttgaaaaatgctctgaactgctctgcctcatgctggtgggaagtcagatggaaatgactttctagagagtttagctggcctccaagcttagtgggtactcactctccttatcccccgatagctgctctgagattttaatgcacattgaagacaatatgataacttaacctggaaaattagcattttggtaagggtctttaacttcattagtattttcataccactttggtattagaaattgtaaagatattaaagggtatggacaatgtggaatgtatgtaccagactcagcagtgtatactgactccctcactatagcccagaactggaaatcccgctaactacctctccccatcctagcctgaattgccctctccacctatgttggttttacaatggcctgacgcctgaaagctggtagaaactgtataggaaaatagggttgggataaatttctgggctgacaaaggatagaggaatatgcttctttttccccttgtccaagtatatcagcaactctaagatgcagatttatcagtatggctctactgggcatgttctagttaaatggtagacccactacctcttctggaatcttgttttccattatattcccacctgcagcttttcaaagacttattctcttctctaatggtctcttggttcttttttttgcccatgctctacgttccgagtgggtcaacattgcagtgggtcaatgagaagaaatagaggggaaaaataaaagaaccagaaagaaacctgttaagtttgcacttacttgtgcattaagcatattagcgtaagccttaaactctagaaaactcactgtagtgctgtaaagtaccactgataaagtaaaagttcatttttatgctgtgtcgttatttagtgatgaatatgatattgcataaaagatgaggatctgtaaggccaggcgcggtggctcacgaggtcaggagttcgagatcagcctgaccaacatgatgaaaccccatctctactaaaaatacaaaaattagccgggtgtggtgacgcgcgcctgtaatcccagctactcaggaggctgaggcaggagaatcgcttgaaccagggaagtggaggttgcagtgagctgagatcacgctactgcactccagcctgggcgacagagtgagactccgtctccaaaaaaaaaagatgaggatctgtgtataactgccaggtgttgtgtgaggtaccatgaataacctggcaatatcctaactgtgcaggtatgaggagtgacccccaggaatataattgcaattaaacttgcaaattatgtggggatactctatttcagggcaataaaataaattatgtctagagctcataactcttacacatatttggctaggtctatgcagcaaaacccaggtgataactgaggctttaactttgggatttgtttggtgctgactctgccacatggtgaaatttggtaggatctcagtgcgagtgtcacatgatcagtctgcttgacccaacatgccagaattccatttctcagcccactctcttctctgcatacatacctacctcccggagagggctgggcgggagcctacgtgtggcaagagccctcactgcttttgttacacagatttcaacacatatggcttgatggagtgtgattgcagtagcatgaatgtttggtgatgaaatttgcatgtcctttgctgggagaagtataattataagatttttgtattcacatagccacatgtgaggtatgagcaggaacggggtctatttaatagcattagattgctttcagatttgaaatatttccttttagaaatatattgtgtaaacaaaatatgtttaattttttttaaaaactatgcctttgtacaaattgtttatcatttgcagaggtctaaaaaatgtaggagaaaagaagctcacaaaatcaatcagatctaaagattgcaaagattgattaccatctccttaaaagcttcagtacatgtgtttacagtatcattctatttgcctctgctcagattctttccaattctaggacaacccaaagtgtatagatcataagccataactgatcctaccttacataatacattaaatataaaatatttatggccaggcatggtgaccagttctgtaatcccagcactttaggagaccaaggcaggaggaacacttgaggccaggaagttgagaccagcctcggcaacatactgagaccttgtctctacagaaaaattagccaggtatggtggtatgggcctgtactcccagctgcctaaaaaaaggcaacttgagaaagtttctaccttctgaaacaatctatgccttgattctatcacttagtattttagttattcctatcaaatacatgactgtgttaatttcttttgccacaaaaatgctgcaaagccacaaactcactccaaaatttagtggcttagaacaataaccatttattatagcccacaagctcaagggtcagctgatcccggcttagcttggctacatttgatataaaacagtagaaatttagaaattgaatatatgtagaatatctcttgtaccaaaaatgaagaggaataatagattttgatttttctttgttgtattctgtgctgggtgctaatctgtcctagctgtcagaacaagtagaagccatactggaaaatcatttatttgttactatcaaatttatttcagtgaatgccattcaaaccactctctctgaggagcccagttaccaagtcctccaccttgttagcaacatggacttaaatgcactaattctagaatgagatcttagcaaagtaccagcatttgagatttgtgcaaattgagctcttaaactgtgtgtatatgtgtgtgtgtgtgtgtgtgttcattctagcactcccactacataccatacaagtagctgtatagcaggtatatatacatgtgtatatgtacataggtaggtatatgtcaactgttgaaaaactagaaaatacacattaaataaagtaagggttgataaacattagtagttggaacattgggagatttggacttctactttgcagattcagttggctgcattagatttaaggaaagaactaactttggagaaatttgtgtttgcatttcaggagagatttcttaaagaggaaactaccagaggttagtagatattaacatctagtgatttaaatttgagaaatgcaaattagacatttaagctgtgggtttgcttcccgttttacttgctctaaaagtaatttttttaaaagccagtaacaaagacatgcaaaatagtactgccatgggggaaaaattacttgaaaataatattcaagattgaagaattaaaaaagcttgacatctagtaccaggaatgccagctggcttgttctgtcaaaaagcaagcatgtgctttggaataacactcttgagtagactctaggcgggttttgagcccttctgattatctaaatagatgtggaagtgacttatcttggtttttctgagtcaaatgagataatgagcaaaggccttagtaggtctttgatttttgcctctaaccctttttctatctgcatgttcacaaggtcaaggctgatgagatatggcaatattgagagagtcagaataggataaagatctcaaatactatatatatatttttttttcatttttttttccctttggtgactgtatgagacatgtcagtaaaactttaaagacaggccaggcgttgtggctcatgcgtataatcccagcactttgggaggccgaggcgggcagatcacttgaggtcaggagtggcaacatggcaaaaacccgtctctactaaaaaatacaaaaattagccaggcgtagtggtgcacgcctgtagtcccagctactcaggaggttaaagcacaagaatcgcttgaacccaggaggcagaggttgcggtgagccgagatcaccccgctgcactccagcctgggcgactgagcaagactctgtctcagaaaacgaaacaaaacaaaagacacacagaaaaactgtaaagacagaatgaaagagatgaactttttacatctcgctcatttcatcacatactatatagtatgtgtatggtttcatatatgttagtgtgtgtgtatgtatatatatgaagttaaaagaaaacattcaccttttaagactaaatggacattgactagattgtaaactgtttttgaggctaagagtttgtttgccatgcataaggctctattttttgtaattccacttttatattcatttatatcagtcctagcagtagatgccactcttactgggtcctgcctaaatgcatgcttcaaatgttggttattaatttcacgagtagtgaataacaaagactcctattgagggacctcttgatttcctactgggcaccagcagcaagcatgacttactggccttcttatgagtgggtaggagttttgggtcaacttgagaacatctatcctttgagtagtaaaaaagcttggtattaggttggcacaaaagtaattgcgatttttgcaccaatctaatatcaacagaggccgtgaaaaacatcaagggaggatagcttgtaattagaagccagatcaacagtgacccaaaaagaatttcaggtttccaggagtgaaatatgtagattactcctctgaaaggaattgtttttctcctattcgctttcatggcaaatcattttttaagccgaaactcaagctctgaaataattgtgtagcaaatagtggctgtgaatagatgtggcaactctccacaagggtaaatagaaaccacttgcagtttcagtcatcacattttatttttcttttttaatagcttctctatttttgctcaccacaaatacatgcacacacacacacaggggcaaagccttggaaaattgcaattttccattttaatttgagagacagcccggtcacattaacagaacccttgacggaataggttgaattcccttctctgtccctataaccccatggccttggacatatccttacctggtgccctttcctccctcttatggtccacttttgtgattctgattttaatttcagttctctgttagtgatgaaatgagcaactgcagatgttccgcttacactggaaatacttttttggcatttaaaagaaaaccctacagatgaattattcccctgaaaggggttcactcagattttctagattatgattctagaaaatagttctttacatttgacaatggagaatttaaatgttttaatatgaaaatgtaaagcactcttgtggggtatagttgaattatgcccaggttaagggaatccagtatttatgtcaggaaaccatggatgtgatagaaatagtatcgctacaaagctgggcacagtggctcatgcctgtaatcccaacattttgggaggccgaggcaggaggatcacttgaggccaggagttcgagaccagcctggccaacatggtgaaaccctgtctctactaaaaatacaaaaattatctgggcgtggtggcacaggcctgtagtcccagctacttgggaggctgaggcaggagaatagcttgaacctaggaggcggagaggttgcagtgagccgagatcatgccactgcactctagtctgggtggtggagtgtgacagtgtatccaaaaaaaaatactgagattatgcaagaatctgactcgaagaagtttgaactgattaaaaagtaccaaatacttcattatatgaggccagctatttagactagtcagcgggtggttcaaatgcagaaaacagatggctttcattagccagaaaccttaaaattacataaatccacggatgcaactaagctatggatctgtgccctctccttgccaaacaggacctctcagctagcaaaacagagagctccttgttcacttttccctcctagttgagaccctgttggggaggaatgctgccaagcctgctctataaggaattttgatctcctagatgataacagagagaaactttttggagaaagggaacaccctgtttgaaaggacaacaagagaacttgttcaagaaggtggctttgcatttaattgaaaattgtagcaactgtaggcgtagggtttccagattcacatctgcagactggtccagattaggtatatatgtttatattcgtttatgttatccccttaagcctcttttaaagccatttctaaaaattgctttggaaagtccatttcacttcagtattctttatattgtggctcaaaaatattttttttctggtaacaaaaatattttctttctgtttttaagacttgtagcatttttaagtttgatatgtacgtctctgtagttcagagcacttggtaaacagcctcttgcttttgaggcaatttatgaatgcttcattgtttttagctggttattttgttcattgtcaggaacactgttttcccatgggaaagcatctccagttttatgatgtcagtggcaagtcattcagtttacaagaattaccttcatattcagtcttagaaaagcatagaccacaaacggccagttatatcacagttctcatcttttaaatgttgtcttagatttttgcaaagtaatcttaactcaccttagaatagtgttaagacataaatagaactaaaatgtagtagttaagtggttatatttcccatctactaaggtatttatatttcttttcttttagaaaataaaaatgtttaaaaaattaggaataattatctttaggatgactttgtaagactgtgcttttttactggcagcaaatacctgccagatttcaggtatttggcaggtaaattgaatcttaaaagatttcaattttaagagtgtccatattaacagatcctgaataggaccctgtgtatcatttattaagtcatttcttggaggcttcactcaggaaaagggagttaacccttggatggcaatgtttaatgtggccacatttccttctggctgaatgccagggagtggctgcgcttagcaaccaggctttgtttcataaatgggttatttgatgcaggtgaggatgccgtgagttgtttgtcttgttttaattcagggagacaggcatatgtagtgaaagcatggaattgtttgcagatgggcttcagtaagaataggaaggtttctggttcaatttgtatctccaagctaattgctctgatttccatatacacatctggtgttggttcggggggaaaaaattttacttgagaaacatggcttttgtgagttgatatttatttgtgaagggcctcttgtaatgtcaaatgtaagaagatctatacacacaaccaattttacaatttctaattcaacagcttaccctattattgaggattcgcagtttaaattattaaatgatctccacttgaagaaaatagagcatgttaatcatcacgattctccaaacatttatttttaaagttaatattaaatctcatctggtggaaaacctgacaggaactgaagcatatattttctagtctaaactctcattgttaaaatgaagacaacatgagacagttatagcgccgtaatcaagttatttgaaaaaaatgttttaaaaattaccactttttggtagtcaacatacacacatatgccaacagatggcattaaaaaatggcaagaacatgagacaattatagggtcataataaatttatttgaaaaaaatgtttaaaaaattaccactttttgatagtcagcatacacacatatgccaacagatgacattaaaatagctgtaaagtcaagaagcagggaggatgacaaagtgaaaaatagaagaaatcaaaggaagttaagtcaaaagaggaaaaaaaaatgaagcatttacttggtttgtcaggtagggtgatccagtgtattttgccaaaaactttcctggttttagcaccaaatgtctcagaacatggcagctgatgacctccctcacagtgagtgatcccagagagcaatgaagaattgtgatgcccttcatgaccttgttttggatgttacacatcatcatgcccttcagtgacctttctggtagcaaagggtttgtttttaaaagagttgcagcatctttaagtctaatatatacatgctcggaagttacaccatcatcacttctgctgtactccatttgttgcacagacagaccctgatacattgtggagtttcccagggtccatgaatagcaggaggcagggactattgggggccttcttggaggctggctaccctggggagagaaattgtcaatttcctctccttgcggggaggaaatggaatcaagtgcatttgtattgacaagaaggtagaacgctttccttagacattgtaatgaacagattgtggataaacaaaagtacagagagagtttgaggcagaggaggagactgtttcaacagaatatttaccagctatggtaaaggctcattagtgtctccgtacagttaacaacatgctgccaagactggaaatctttgggacaggaatgaattcggaaggtgaacagaataaagtactgtgggaacaatggcgattccattagtggattgtacattccttacgggcagggccctccatagcatctgatgtagggccttatccacaggtatctgattattatttgactttctttaatgtttttgcagtgttattatctatactacttatttcagtaagattgacaacatttgcatttcgatttctaagatcaagacaatgaatttcctcttaatccctcaggaaagctgtgaaatttaaatttatagagcattctacttagcctgctgctttgcatctgtcagagaatgagaccccccagtttcatggaagtcacaggaagtggcaaggggctcagatggagttgaggggttctagctatttctgcagatgatctggatattttggcatcggctgctttgacttaaccatctggcaatgtaaaggcagaatttcgttaaatattggaaaagttacttgaaaacatggctctagagattttgccagcagcttttgcactcatgacttggttcaatctaagacctgttttgtttttttgttgtaaggacctaagtcctctgttgggttttgacgaagtatgtgtaaaaatgactaaaatggccagaggtatcttattttacatttatgtgggaagaaatgtttggaaactgtttcatttctttaactgaaaatttctcagtgcaattttagttggtgtttttcctcctgtggacagtttttaggaatgatacaagttatcgtggaatcacccagttcttgagtgtgtgaacgaatggcttctgctggaagttaattcttcttggcatgggtgtctcacatttccccagcagctggatttgacaagggagggcctatcatgattaatatgccttctaattgattggtttaataacacctttactcctgtggatatatttttcatttcttgctgaatttttttttctttttgagataccagaacctgttaagtgacacggtatagatatttcaggacttccattttctcttttaaaaatatttttgtaaaggtaatgcctgtacacagaagagtttgaaaatacagaaggcaccctttttcatgaagttattttgtgaagtggtctattgcctgcaatggtaatagctaggaccccttacttactacccagcaggcactatgtagagctccaaatgagaaaatgttggctccttgcagatggttgggagaggagacaccagcactcttaacagacttgttaagagttgagactgataaccagagaatattctgggggaaaccaggagggatcgccaacatactcagttatatttgtggatggtgaattctacagtgaatttttctgttcaaaatcataatacagtcacttgctaactaccaacgccatacttgctctcagtgctgagaggtggcacaaatattattttcagtcttggtcatcaggcagggcctggcaggcatcatgctctgtgtgagtcagtggagtttattataagaatgcggtagcctccacagtgattatatttattataggaaaacgtgtaattttgttgtcagaacctttcagcaggtaccacaaaatctcatatgggaaaacgtgtaaatttttcatgaataaattcctttcggtattggtaatttccttctctgttttagtataaaagaaagcattgccttataggtggctaagaacatctgtagcatacataacacttaatctaaaggagtgttgaagaccgggctgattcctaattgagaatgagcaagaatagaactctttttgatagttatccctgttcttcctccaagcctctgccttggagctatggatactataactaactgaagcttcttctttcaggtacccactgatggtaatgctggcctgctggctgaaccccagattgccatgttctgtggcagactgaacatgcacatgaatgtccagaatgggaagtgggattcagatccatcagggaccaaaacctgcattgataccaaggaaggcatcctgcagtattgccaagaagtaagtcctgtccggtggctagcaattcacgttggatcacatgcatttgttttcaaaaaatttaacttcttgtattttgcatcagtattttaaccctacagtaaaaatcttggttcctaatgattcaccataccattaatatatttatttgcattaccctatgatatacatataaatgtttttaaaattatgatgtcgtattatgaccatcactaaacagtagtttaagatgtcacagcacttttttttttcctcactctgtcacccaggttggagtgcagtggcaagattatggcttactgtagccttgacctactgggctcaagcaatcctcccacctcagcctcccaagtagctggactataggcacatgccaccaggcctgactgattttttttaatttttagtagagatggggtctccttgtgttggccaggctgtctgaaactcctgggctcaagcgatcctctggctggacctcccaaagtgctgagattacgggtatgagccaccatgctcagccctccacactcctttcatcttcagtatatatctcaccacggctctacagtcaaggtcttttggttaaaagtgctagcattaatttttttctgttaccagcttgatacatattttagttcatttgtatctgtttgtattctattatagtttggttttttcctcccttattaattttactttttgactatcatgttagttctatgaaatatactcagaaagctcacttttcactcattctctattgataaacattttcattgttcctgatttatttttttggcaaaagaaaatacatatttttccttcttgtacaaaaaaagtacaaagttcactgttctgcactttgcttttttttttttttttttttttaacttaactttgtatcctggaaatcatcctttgtcatttcgtggagatcttcatttttgtttaattctttgtagtctttttgctgttactatacagggtgctcctttcttattcaatttaaaatagctggagttccaggcattttatctcacacttcttagatagttatctctgcattgtgactgcatcttaagaacattagaagtaattagtcttatgcttgttggcaaagcagaattctcgacactcattataaacagcagatagcctggcaacattttcttttgttgtaatcctttttgtactagaaatttttctttagcctacttggataatgaatgtttgttgtttaattaatattactattctattgagatccttttattttaaattgtaaatactaaaattattattattaaaaggtttaatttgttttgatagcgctctgtttaagaaaggacaagctctaattactaattggtgttttgagaagcaaaaagcatctacattatcacaatatattacatattaagtaatttttatcttgaaaggagtatgaaccatgatgtgaaatgatgaatagtggaaatcactaatacttaagttcattatatgtattttttgttttgttttgtttttttttgagatgacatcttgctctgtcgcccaggatggagtgcagtggtgcaatctcagcttactgcaacctccacctcccgggtataaatgattctcctgcctcagcctcctgagtagatgggactataggcacccgccaccacgcccagctaaatttttttgtatttttagtagagacagggtttcaccatattggccaggctggtcttgaactactgacattgtgatccacccatgtcagcctcccaaagtgctgggattatagccgtgagctaccacgtatggtccattatatgtatttttacaagaacattctgtgtgctgatttactaagtatggattgataataaatcagcttttgcctgggtgtgacttttataaagtgtcaatgttagaaataatatttacattctgctgaagagttcttgtagtacaattgtgtagataagttataaattttataaatcagaactctgtgcatacttatatgtttttgataccatttttttgatatatgcatacagactatgtattctgagtgtcaaataaactttttttaaaggctagaattaaaatttagtttatgacattgaccaaattgtccttttctggtgaatcgactattttgatacatgtgtcatagtttgcatctaagtttttcttcccttagtttcacgtatgaataaccagatgttttcacatttgtatggtggccataccaaaaattactcttcttgaccccaggaacacccctcttttcccgtttcacttagagatcctactaatgcctgggtagctttactttctgtcttagcctgttgtttgtcccagggtgtattagtctgttctcacattgctgtaataaactacctgagactgggtaatttataaagaaaagaggtttaagtggttcacggttccaaaggctgtatgggaagcatggctggggaggcctcaggaaacttagaatcatggcaggaggtgaaggggaagaagacacatgttcacatggccagagcaagaaagagaaagagtgtgaagggagaggtgctacacactttcaaacacccggatctcatgagaacactgtcacgggacagcactcgagggatggtgcttaaacattgaaaccacccccatgatccaatcccttcccaccagaccccacttccaacactgggaattacaattcgacatgagatttgggtagggacacagagccaaactgtatcaaagggttgagcacagagtggttcttcccagttctggactttaccagattgttggtggccaccatgagtggggagaattagccctttgctgtcaccttcctcttgcaattctggtattatctgtcctctgcctaccacccacccacggaagtcttgttggatgatacacaccagccagattcttcaacattaggcgccataagtaagaaagggccaaaacatcataccttgtgagccattttaatggatttgggctttattttgtagcaacaggaagtcactagactttattttttatctatttatttttttctttttttttcttttgtttttgagacagagtcttgctcttgtggcccaggctgcagtgcagtggcacaatctcagctcactgcaacctctgcctcctgggttcaaatgattctcctgcctcagcctcccgagtagctgggattataggcgcctgccaccacgccgggattttttttatttttagtagagacagggtttcaccatgttggccaggctggtctcgaactcctgaccttgcgatccaccctcttcggcctcccagagtgctgggattacaggcgtgagccacccgcacccggcctagactttattttttcagagaagaggagtgattgtagatttgcatttaaacaaatcaccttcttgctttatcactatgtcccctaccatatatcttcgttctcccagagactgccatgctgcagcctctagccgtgtgctgtccagtactgtagccactggccctatgtggttgtttggcacttgaaatgtggctagtggaaactgatgtgtgctataagtgtaagatagataccgtatctcaaagatataatgtgagaaaacctgtaaaatgatcacattcatttttatataggtttaacattgaaatagttatgttttgaatatgttgttaaatacatcataaatgttactgagttgtaactatgtgattaaaattgatttcacttgtttcttttgacgtttcacgtggcagtgaggaaattgaggttccataggcagttgcattctgtttccgtggaacagtgctgttctctgtgctatcccgagccaccagtgactctgagctgtaagggtcttagatcccatgatctggcaagtgggagagggaggtagaaatgagtccctccataccttcaaccagaacttcactgcatgttgcaagtcagggaacaaggcttgtttggggtccttttaaatacatctttcattaaatacatttggatgtaagatgattatatgcctttctagaaccctgtggtgctctcttcctcctcagacataatgtctttggatactaagggtgcattgatgaacagaacacagggcctgttcttcaaagggggagaaaagcttgtaaaatcataattttagcaatctaaaaactacatggtgacagtgacactaataccatcagcattgagcattcacaaagggtcacaaagggtcagctactatgctaagtacttgcactcattttacccactcagtgacacctgtggagaagaaccgaagaaagcaccttggggaattgcagcattgaaggcaaacaaagagagacgattccccatgagggagatgagcagtggccagagagataggataggaagtaggaggcgttacatgctggaaggcaagccatgtaaatttctaaatgaggggaaagataagagtgcaagcatgatgcaaacggaaagcagttgaagtgtagtttttgacatggtaaaatcatgtctgtcatgcagactgaacacatgtcaaatattttattcaattcattaatgagatgaactgtaagatgtgaaaaatggttcattttgacttggagagatttaaaattccttccccagcacacttgagttgcatggctatgaacaggaatcatctggaattatctggaatatcgtcaaattatttccatggtacaggaacacttgcattgctatggggtgtctgcagtatccatctttacaaagctctaagggtgtggaatagcttgtaaggatgtaagtaataagggtgtaagaattttaagggtgtaagtcgtaaaatagcttatttagtagcaagtcaactggaggaacatgctgtagaatcagataatcctttccccgccaccctcagggtctgcaagacaacacctgcatttcaatgctaggacacccagcaatctcttttgctcatatcttgtttttggacatttgtatgtgtgtgtgacaaaacattgttaggatctggcaaatagaaggtcattgttgaccctgtggaatagcatggggagaagttacgttgtagtccattgcaggaaaaacaacgtgggtcaatggtgagtcagctgtggactcctggaggaaagacctagaggcaaaaagctttgaggtcattgaagacaaaaggaaaggctttgtgattttgatttttaaatggaaggaatttgggcctaaggaagcttaaactaaactgtgggaaggactgatacccatcctaagcactagttgcaggtatctcttaagaactaggttttggccgagctccgtggctcagacctgtagtcgcagcgctttgagtgagaggatcgcttgggcccaagagtacaaggttacagtaagctatgactatggtattcagttctgtaagaactaggcagaaaggagatccagtggatatgtgattgcctgggtcttggaaaggggagggaacatctccttttctgaggaagaatggggagatagggtgggttaattaggcagtttcttttgccaggtgataaaaaccccctaaacaatttgtattttatatatggagaatattttctcccactgatgggaaggatcgtagtgtgggggatgcttacccaatttcttaaaaatgtacacagaaatgagatccctaggtgctggaaccgagggtcagtactgcctagaatttccccattagggtctcttttgtttctgcttaccttcctgctgtgtgtttactccttttctcctgctaagatgggtgtcctcaaggagaccagggatgttggtagccacgacctctggtagtgttagtcctggtttggcatcccaactttgttctgcccatgggcattatcagggagtgcttctggttggcactgctttgagttacacgtctgcccttggagccaccaccgtatctgcagggactcagtatcaggactagcccatcttggccttgtgggtgtggccgtgtgatgtggggagaggagctgttgccagaagagggatgaggaatggcatgggcaaaatagaagaatgaccccagtgctgcaacacagtgggtatggattagaaaaggcttgtaggctggacagggcgaggtgagggagtgcatcatgcattaggattttaagtggctttttggggagtattgagcaggtggcaggggagacaagttcactcagaagttttagacagtgttgacattttctttcaaattgtgcatcttgaattctctagaacattctttatagatatttcaggatcttcctgccactttccacattgtagctattctggtgtttttcttttataattagaaataatgaatagttctcatttgtaggcttggattttcatgcgtgtgttggaaagtgttcgttttgccttttttttttaacttcatgtttttattttttaaaccgtattgatggattcattgctaggaacggcaaggaaaagaatactctcacaatgttaccacgtttccttctcacaggttttataagttgtattatttttatattttcaaagttataatcttaccatctcctctgttgccatacttctcattcatagggtctgtctttaactggactcattgtttacagctagtcttttcatcagatcatctcaaaccctgtattacattaatattttgattccgttttgttggatgactttcatcttaatcattcttattgttgaacaatgtttttcttattattgaacaattgcttcattaggtatagaattcctggttgatgggtgtttgattcagcaccatgaaaattcacggtattctggtatctgtcattgggcaaattcttcttctttttttttttttttttttttgaaaaaaatgcgtggaaaccattagttaccattgacagagctactcatttaatgattttttttttctcccaatagtggtggatgaattttttactttgcgttctcactttgtgtctctcatgaccaaaatattttagagataactagctggctaagtctgaggtggctgttaacagtctggtcctaggatagaacaaaaccaacagaactcatcaccgtcacgtcgttttgactttttgctcacaagtttaactcattgtttaatttgtttttccaaaggattgctttgcagtatacatgttggtgcatagcttaacatgatgataaatacataactttgactgtgaattatctactctgctcctttcatagtctcatgcttctctgaatttgtattttgtgttactgggttgttttgttgttatcattcatagtgttttttttgcccttgattctttgaaccaggttttggtcaagggcaaggttcaagagaaaaagtaaaaacacagtcttttatttttgctcttggttataaacccttgtaaagtttgattgagaagataacttggatcttatggtttaaattgagtctttgtttaatcccaagtcttccaaattctttgtgcttatgtattctttcctctttcccaatcgtaatagttttgcttctgcctagtcattggtcaaatacctgcctttcaatgcatttaaaaaatattttgtgttagcaccatttgagatttttccccccttttttttcaagtatgtattgaggactgttatgggatgaatgtttgtgttcccccaaaatttagatattgaaaccctaaccccaggctattcggagatggtattcggagatgatacctttgggaggtgataactgttagatgaggtcatgagtatgtgcccccgtgatggaactagtgcccttataagaaaagataccaaagagcttgcctttttctccctgctcaaacgaagaagtcacataaggacacagcaaggaggtggctgtctgcaagcaaggaagagcggcctcaccagaactcggtcatgctggcaccttggttttggacttccagcttccagagctgtgacaaaagacatttttgttgtttaagccattcacagtaaggcagcattttgagctaagacaaagacctactgtggcttctgtaggcaaaagccctacagacccaaagtgttgtgagaattaacatttctagggatcatgccttacagtggattttatccaacacttagctctgacctagagcacgctagtcgtcgttaggtaaatgcttgtggatggtagtttctggcacagagattggagcggtaatgggcaggagttctgtatccagcttatgctgagagagcttcccataaaatggagcctatactttccttttgcagagaccatttctatccattgatagaattcttttttttctttttcttttttttgacgggatctcactccatcgcccaggctggagtgcagtggcatgatgtcaacccactgcaacctctgcctcctgggttcaagtgattctcatgcctcagcctcctgagtagctgggattacaaggtgcacgccaccacatgtggctaatttttgtattttggtagagatggggtttcaccatgttggctaggctggtcttgaactctagtgatttacctgcctcggcctcccaaagtgctgggattacaggcatgagccactgcacccagccttccatcgacagaattctaaagacatgtttaggcaagagttggtggaatgttggcgtgtagtccagatttgccttcagtttgtttttatccgcttcaaatgcaaaggccatgataattcaatagtaaagtcataaatccatagtatgacttaaaatatttggttgtaatattacaaagtatgcttccaaacacattaagcatgcaaaatccttatattgttctttttgtttagtgtttagggtagtttgtgtgaatcatagatgaccacagtagactgttgagttgttattttcttttgacattctttgatagaaaacagtgcttttcctctgttatttatactagaagcaaaaagtatctctcatagcattatggaaacaactcgaatacaactacgtcaattattcatcttttttttttttttttttttttttttgagacagagtcccactccatcaaccaggctggagtgcagtggtgcagtcttggctcactgcattctttgcatcctgggctcaagtgattctcgtgcctcagcctcccaagtagctgagattacaggtgcccacaccattctcagataatttttgtatttttactagagatggggtttcaccatgttggccaggctggtctcgaactcctgacctcaagtgatccacctgtcttggcctcccaaagtgctgggattacaggtgcgaaccactgtgcctggcagttattcatcatttaacagcataaagtggccacttgctttaataaactattatagtaccaaaattttggcctgaggaatttataaatataaatagaacaaaacaaaaataatattccccttgaaacatattctaaaaccaggggctaaaagttagaattgttagattttattgtcctgtttctttgggatgaaatgaaattttttaaaaaccatagttttggccgggcgcagtggctcacgcctgtaatcccagcactttgggaggccgaggcgggcagatcacgaggtcaggagatcgagaccatcccggctaacacggtgaaaccctgtctctactaaaaatacaaaaatatttgccgggcgtggtggtgggcacctgtagtcccagctacttgggaggctgaggcaggagaatggcgtgaacccgggaggtggagcttgcggtgagccgagatcgcgccgctgcactccagcctgggcgacaagagcgagactccggctccaaaaaaaaaaaaaaaaaaaaaaccacatagttttacttaaaccaaaggctttgggattccagaagaataaaggaagtgtacttcaattctacatctcaagaatctatttcttcccaaatttaatacaggcaaatttagtctatatttattgggcactgttaggtttttgtgtcaggtgttgctgagtggcgggataccattcttggcccataaggaccttataaatctattaatacaattaaattgtgaagaaaatttagaaaattgcaaaggtagaatgaggttgcaaattggagggtcttattctggagataggtggaagctatggcagatttttagcatgaatgctttctggtcaagacacttttagaaaaattagcttgtttccaagagtagattagattggggagagaaggaattcaaattacaaaataatagtgtgaaaagcattgtgggagatcatcctgtccatcccctcattcatgatatcctgaggtgctgtattaagggcatcattgctctttgtcacccgagcagtccaggaaggctgcctgttcagtcttagactgtatcctcacagtcttaaaccatatcctcactttatgatagaaacacacaggcaagtgttgtaagagttacatattgtcagttaaacaagaaattggatgagtccccatactattcttcctcttttaaagagagaacttgggccgggtgccatggctcacacctgtaatcccagcacattgggaggccgagtcgggctggtgacgagatcaagagatcaagaccatcctagccaacatggtgaaaccccgtctctactaaaaatacaaaaattagatgggcatggtggcgcacgcctgtagtcccagctactcgggagactgaggcaggagaattgcttgaactcggaggccgaggttgcagtgggccgagatcacgccactgcactccagcctggcgacagagtgagactccatcccaaaaaaaaaaaaaaaaaaaaaaaggaaaaaaaaagagataacttgaaacaggctcttccagcctctctattcttttaataacatgcagtgcacttcttggagctaggggctagggtctaggggcttcttgaaggtgttgatgtctctggtaacttacactgcagggcaggtctctggagggaactttgaacaggttaagcctcaaatgcaggcagagatttccaattgggaaagttaggtgaacgtggctttatcatctcttttattggtttatgggtattttctctttttcctgttttctttcccaccatttaacattatctgttctctgcctttttaaccttctggctttaaatgaacagttgcttaatctatagattaacaggatcagcaaacaaagcacagcagtgcctgcacaaagcagaaactgcctgttagatgagttgagcaaaaccatttcctttgcccaactttctcctctaaaatacataactgaacatgggattcccagacacgaattgtttctcaacctttctttttccattctacagttgtatgaaattaaaattaaataaaaagcaaacaacagaggtagtctttttaatcttaccgagttggaaggtatactatatacattatcctatggtagaaggtctggtacattcttgaccattattactttgctatgggcacccttcacccttgtaggctgaaaattggcaaatcataggcacgtatacattgtggttttggaatttgaaagatctcaaattcatattgagtgagacagtttttgaatggagggatcaggctgtctatatgtggatatattttatgcatttctggtctgtataaatgtaaggattgctttactgaccgtagatttcttctagggttaaaaagttgaaggcagtttggatattttaaaataagaaaattagccctacattgaaagagagaataggaaaatctaggctatgtgtacacatctgcttgtgttttcacaattgtgtcctgtcctatttatttttatttctctcccatctcttccctcccacccacaatttgtttttcattcaacactttgaaattagaatagcttatctatcaaacaaggttctttgacaggattttccaactctgagtatgaaagtgtggatataacaatatatttatatagaatgtcagaagcagagtttggccagattattgggaaatattctaacgccctgcagcattttaccgcctttgcttttacataaggccatcatttggaaacatagcatgctgatacctcccattattgcagtagcgtttcatcagctgcacgctgcctctcagcgcctcattaagttgcaagcagagaacgttttcgttttccagttctctttctcaattaagttagagattgtattttcagtattcctcattattaaaagaatttttgttgagaatagtttaagatgtgatatttctttgtattccaggaaaatttaaagaatgtcattgaaatccagaaacagaagtatatattgtctaggacatgctttgtcttggtttatatgcctaagtccgagtagtttaaaatttatgattaatatactctttgaatgcttagaaatggcatcgattttagttgttctagtttcatcttaaataaattggagtaattactaactcaggattatgatgtgctacacataaaacatttgcagtgatgtctggtacttaggaaaccctcagttatgacatttttcttactttcttcttggatatgttctttgaaaaagggactggtatggaaaagctttgagacgatgaaaatatacaagataggctatctctgaaacaatttggtatagagcatttgattctctgtttcatgtatatattcatatatgctagctgcagtcatgcagacacaatttggatctgggtttttttttttttcctttttcacatgcagttataaatttagaaacctggctgtttcctctggactaaatgtatttatttaaattttcagtgctttaaatgcaaaattacaagcatatgtacaagtagaaagaatagtaaaatgaaccctcccatctatctgtcactgaattgcagtaatgatcaaatctagtcagtcttgttcctgagtcagtctggaatgcaggttttttcccttaactattcaggttctccagcaatcctggcaaaacacatgcgggtttcagctcatctctttcagtgacctgtaaattaagatgtgctaaagcatcacatgttactcattgacgttttgttaatatatttaaaacattttattagtaccacataatttttagcgttttcaaaaagaaataagaatttggctaaaggtgaattttaaaaattgaatgactaagtagaaaagtaggcaaactgttttcagaattagtagcaatttccaattccatttactctgttcattaactttgttttcagccttttgttagccatgtttgattttgtgtttttgaaatacctttggtcattttaggacttttggcattaatcacctgtcttaggtggcctgtttacaaaagggacttttcggttctccatttgcccttaatgttgggaatagagacaaagtttctgtaggactctgacaacatatggctttacaaagtttttttttaatatatacatttctcttcttggctttcttaaatatcatcaatgtcttttcttgctttacgtatttagcaacttaaatgtcatcttgtctgagatcaatatatttccaacttggagagatagtgagaagagagacttcagatttttaaaatgtggaacaaaacattctgatggtgaccaggttttaaggtatttcttcagtagacaaaactacttaggctaccgatgataagcttttaatattaataataattattatatataaaaatattaatataatatgatctaagattgtttctattccccctctttcctggttgttaggatttggaatttcttatgcactctttttttttttttttttttttttctgagacagagtctggctctgcctcgcaggctggagtgcagtggcgcgatctcggctcactgcaagctccgcctcccaggttcacgccattctcctgcctcagcctcccaagtagctgagactacaggcgcctgccaccatgcccggctaatttttgtattttttagtagagacggggtttcaccatgttagccaggatggtctcgatctactgaccttgtgatccacccgtcttggcctcccaaagtgctgggattacaggcctgagccaccgcgcccggcctatgcactcttaaaattatttcatgtactgatacattcactttcaatgataaaacatggctgtatgaccaggtaggtaggctgcttttcagactcctgtactaactgaatgggccccattagcccaagtgagagcttaacttgtcactcttcctaaatgccttcctcagctgagtgcttatttacagtaatctactgcttatagcagatgctatgatttgtataagctgtccatatctacttggaagaacaatattgaaaggcattgagatacttactttccctcaaaagcccataatccaacaactatttagaatatcttatttaagagataggtttataatacccaaagggaacttaatgtatactgaaagtccctgattgaatggattctgaccttaaccagaaatattaattacatgcttatcagacacttactgtgctatcccagggtttgccactgttgagggaacaccagatgaatcatattgtccctgccttcaaggattatatattctaataggacagacagcccatcagcagaataggaggtagcaagtggtcagggatcagataaagtgatcaaggcaagtggaggatgcagtggtaggacagaatggtctgcgcacagagattgagggcatcatgtggtgggaattagtgaactagcatgcaagccgggcctttttcttggcttttgttcaattggaaggagcataaagctactaaaggagcttatgtttagaaatagggcttattgaaggggacaaggcatctcctagaatccaaatgcacatcccaagacttaaaagagttagagggcacaggcaggccctgtcagatccggtctctgccagatccagtcttgtctgtttctcatcttcccttgtctctctgagtattccctgttttcctttcctggactaactgcttcttccagatgcctagtttgagtccacccatggttttttgggggcttttctttgtttttttgttacgttctgtttttgttttttgtttttttgaggcggggtctcactctgttgcccagactggagtgcagtgacgtgatcccagttcactgcagcctcgacctcctcgcttaagctgtcctcccacctcagcctcccgagtagctgggactataggcgcaagccaccatgcacccatgggtgttgacatgccacctgtggctcagacttatgctcacctccagtcaagtttcttccttatctaacgacagcctttgtgtgttcgtgaaagcccttgagggaaagaatgctacgtacagtttggttttcttgggctctaataagctataggggatggtgctgcagagtttgaaatacagtcactaatgagtcctccttcagagagctgagggtgggagcaccacataaaaggagttgggggtcagcagcctcctgatagtctgaaagccaaagatgatggatgtggggctccacggggaggctataacatgccacgttatgttttctgcccttgaggaaagcttcttttcaccaggcaggcagtacagatacaaacttaatagcgatgtgaggcacactgataaataccagaaaacattctgtaagaggggttagcattatttcactgtgtgcagaggaggtttgtccatgtggggggaccctaatgggcgtaggcatttgaagtgtagtctaagggatcttaggtaagagtgtgtttggaacacagtgtacgtatttatacagcaaatgctctgtgtggctataatttaggaaaatttgtaggacttgaggacagcttatttttctactagctgacagaggcttgggtttgcttctgctttaagtataagtatctcgagtccttttttaaaaaggaaaatcaaggaaatagttggaattgggtttcacataaaaaacattttagaaaagaaggggagtatgagagttaggatttgctaatgtttgctgtattagcaaattatttgcaatgcttgtcatattagcaatacatgtatgttttggaaaacacatgcaaattaagcagcttaaggaacttttatctttatttcctatgtaagatttgagatgctgcaaagaaaatattaaaacattgaaccgatacttacagtagtcctcctatatctgcagaggataacttccaagacccccagtgaatgcccgaaaccttagatagtaccaaacccaatatatactatgtttttttcctataggtacatacctgtgataaagttgaatttacaaattaggcacagtaagtaattcacaacaactaataatagaatagagcaattatgacactacgccaccatcactactcttgcactttggggccgttattaagtcaaataagagttacttgaacacaagcgctgtgatgaagtgatcaatggcaggtagcatgtacagcatggagacgctggacaaagggatgattcactttctggactgtgtgggtttgagatttcatcacactgctcagaatggtgcgcaatttaaaacttattgttggctgggcatggtggctcatgcctgtaatcctggtactttgggaggccaggacaggaggatctcttgaggccaggagtttgagaccagcctgggcaacataggatgaccctatctctttcttaaaattaaatataggccgggcacggtggctcacgcctgtaatcccaacactttgggaggccaaggcgggtggatcacaaggtcaggagattgagagcatcctggccaacatggtgaaaccctgtctttactgaaaatacaaaaattagccgggtgtggtagtgggtgcctgtagtcccagctactcaggaggctgaggcaggagaatcgcttgaacctgggagatggaggttacagtgagctgagattgcaccactgcactgcaacctgggcgacagagtgagagtccatctcaaaaaaaaaataaattaattaaataaatagaaaaataaaactcatttatttatagagctttctatttaatatttttggactgaaactatggaaagcaaaaccacagataagggaggactactatagttatgataaaaatcaggaacttaatctagccacgagaacatttgtatttctgatgaaatttttattcttgtctaaaatgttgaactatatttatatttatatctttaaatataaatgaactatatttatatctttataaatgagctatatatttatattttatataaatataaatatttttatatctatgtaaacataaaaaggctttttttcctctctggatgtttactggggttatttaataaaaacctagggatgatattgggaatttttgttggaattttaaattttaacgtgtttgtttctttttttgttttgtttcgttgtttgctttctgagctgggagttggctgtgcatgtggcagttgctttatcaaaagggtcttgctctgcttcagaagaagttttgttaccttgattgctaatgttctcccccttaaataaacctcctgatgttggaacagcaaaattgcattatgtttggaaaatctaaattaataatcccttatctctgaataaaagtaactgaatcaggttgaatttactgcttccattttaataggacagtaggaaaaaactatgcatgggctttatgtggttcaaatttttttttttttttttttgagaccgagtctcgctctgtcaccaggctggagtgcagtggtgtgatctcagctcactgcaacatccgcttcctgggttcctgcgattctcctgcctcagcctccggagtagctgggacttaacaggcgtgtgccatgacgcccagctaatttttgtatttttagtagagacagggtttcaccatgttggccaggatggtcttgatctcttgacctcgtgagccgcccgcctcggcctcccaaagtgctgggattacaggtgtgtgccactgtctccggcctggttcaaattttgtaatctccacatccatctgcatattaacaattgtcattgttggtgttatagagagagaagctgaagcacagaaaataacacgcatgttctagatttcctggtgggaactggaagtaaattctgtgtttggctgatcactgtataaagttctagtactagtctttagggaaaagccccgtcttcatggattttaatttgtcaatttgcaattctacctacttggaaatagtcaacctaatcagttactgccctgttgcaccaactattaccataggaatctgaagatggtatgcaaccaacatgaaaaagagatccttttctcctggtaatcagtttgtaccctacaaacaattcgttggttttaagttgtatagagggaaccatgatgtgaatatgcctgccactgggtttatagaaaaccgatgactcctgaggaaattctcagcagggttgtctttcagtgaaaagaaccctttagaaagatgcagtaactcacactttactgcacataaagtcatgtccctcagggtggactctcaggtgtcatacagtttatgactcatgagtgctgcagctttgtgatctaataaacaagtaaagacggtgggagaattatattcctgtacaaaaagccacttcacctttcattatataggaaaaaagccatgggaatattaaatttttagtggcatttttagagcattttctgtgatctaaagtgcctgcattgagatattaagatacttaagaacaaagtaaaataaagagaagtattaatagcaggatccctttggagctaggttactgtggcagtggtttcaagaataactctctcagcacccaccccaggattctgatttagagatttctttgtgtgttctcttagcatatacctctaccactgagtttatcccctgctgctacactgattgataccttatttttaaatttttgtttttaaaatagacggttttttagagcagttttagattcacagaaaagttgagaggaaggtacagaggtttcccatatacttgctacctgcacacatgcttagcctctcctattataaacatcccccacagaatggtacatttgttacaatcgatgaaccaacattgatacatcattagcacccaaagtccatagtttccctgagggttcactcttggcggtatacattttttgggtttggacaaatgtataatgacatatgtccatcattgtagtaccatacagagtagtttcactgccctaaaaatcttctgtgctctatctgttcatcctccccctgcccccaaccacccaaacccgtggcaaccactgatctttttagtctccatagttctgccttttccagaatgtcatatagtgggaagaatgtcatatagtatggagcctattcagatgggcttctttcacttagcaatattagttaagttcctccatgtcttttcatgggttcatagcccatttccttttagtgttgaatgacattccattttctaggtgtgtaccccacagtgttatttattcattcacagtaccttattttttaactgatttttttggggtctgggactaaggtgaggtaaacaaggcagtcaggaattgagattaagaatttttaatgtaatatttttaaaaatcaaaattactgcaaaaaaactccatgatgaacaaaatatcaactttttagacagagattgagtcacgctcaattgacatcaagccatgcatagttctcctactgccttattaaaatggaagcagtaaattcagcctgattcagttacttttattcaaagataagggattattaatttagatttgtcaagccctctgaatgtcatggacaattgtgagtgaaattccgtgtatcgtctaactccccatggatgttatcttgctcagaaaccttgttctccctccaaggaaggcactacttctcctgtagccttctcaggtcgaagttcttttctcaaaatcctcacagcgttgcccctagaggtgggaatgtcctcttttcctcttcatttcctcttttcctcttcatttttgtttccaaaccactcttcctttctcttccctaaaagcccccctacctcagcttgaagtgcatgctttcagacaaatcactttgctcctccacctgttggtcatctccagacctctttctacctcatcgatgttcaccattcagactttgaagattttagctcctgccttgctgtcatcaggtgtagctgcttcatttgctgattcttaagtgatcctaatattgatctcaatgatccttccagtattccaatttgtcagttcatgattctcatccctccagtgaccttgttttcatcattctccatcacccattgcttacaatggtcatattatactccttgcaatgaccaatcactgcaactcctccaaaattttaatttcaattatttgactctccaagtactacttattaccacctcactttctccagtcctgtgcgccatacattctttagcccctggagtgtgatcagtggactcagattccactggtccctaccaccttttacctgtgtctaattcccctcatgttctcacttttgccacttgagattgcatggcccagcattctaatcattcccttgcttataccgtcacttctctattcgttgttatttatctggcaaaacaaccaccctgttgcaatgcaaggtttatgcaagggaatgcacattttcgaaatagatttttatgtttatgtttttctttcaaatctctactcattaataaatagaagtggtttgatatttcacaaatgtgatttaattgatcaagtttcacatttcattctaagtgctcagttaaacaccatgatgtattcacaacagtaatcaaagcaaggggctgtagttagttataggagcaaagagaattcatgagtttatttttatctaaatgacacccttgataacttttcgataagttattttcatgtaaattacttggaataagagcaggatttttatatagaaagctttctatgtgtcatatcctgtaaaatgtttgtccgattagtgagagatagggggaggttgaattttactaaacataatatccccagccatatctactgtaacgtttgtttaggacattacagactattatcctacaccaatttatttcacatcaaaaatcaccccatgcttgtaagaatcctcctttccccctcttgtttctattttagctcccctggaaaaataatattttaagtctaaatgagtacaataaattaaaaagttgcattgcttaatattttgaatggaatagctagatgcttgttcatttgctatctttttctttgtactgaatttctttagcttggtcagaggtagagcaggcttgactcttagtggatagtggtataggttgagtatcccaaatttaaaaatccagagtccgaaatgctcaaaaacccaaaactatttgcatgtcaacatgatgctcaaaggaaatgctcattggagtattttggattttggactttccggattccagatgctcaaccagtaagtatataatgcagatgttctaaaatcggaaaaagtcagagaccttgaaagcacttctggtcccaagcattttggataagggacactccacctgtaccttacagtggaggcttgttagatgcttgtaaatgccagcccctgcctcaagtaacaattgattctttttgtgtgctctcccaggtctaccctgaactgcagatcaccaatgtggtagaagccaaccaaccagtgaccatccagaactggtgcaagcggggccgcaagcagtgcaagacccatccccactttgtgattccctaccgctgcttaggtgagccggccggccgtggggctggtgttgattgggggcctggtcttgagggaagaaaaagaggatgctcctgttaggtcacatacacagacttgttcttcagcacattgccactctgtgttgtactgtgttttggactcttgcagttacattctgtgcactgaccctataggagcagtatttttgagttccctgcctcagaatgaatttacccagggtgtatattgaaattacaaattcctgggccagttccaggactcctgaatgaaaaatgcctatagtagcggatccgggaattcttattttaccgtatcgcatagatgattctcatgaacaggggccttgtgtgtttcttcacatagactttctagaagaaagaatctaatgtgaagctgcagcattttgttaatttctaaaaaaaaaaaaaaaaaaaaaaaaaaggctgttctacaataactactcctcttatttggtgatagtagaggaattggaattgggaaggctttttttctgcttacatcaaactggaggaaacagtctgattactaatgtttaatgtttgttttgtcacaaacctcaaatttacctcaacattttatttaaaaaaattgagtagttttatgtggtatcgtgctcttttcctctggaaactgtcatactccatatttaatctaacttggttattagtctgttcctagttgttgtttttatgtgaccagtcattgcagaagtcaagttctttgctctggtatcttacatctagatgttttccacaagtgtattcatcagtaggcaggttgtaaataaggatatagagattgtctgtggagattgtggacaaatattgatgtatattctgatgacttcttataaaggttaaaaggaatatttcaaagaaaatccaacagcaaacttacaaagtaaggatatttactgaagattccggagatctatgtaatatatggtcaaaaatgaatgtcctaagagcatactgattgctgttcattcatgtgcataatttgagacataaaatgaaaacactgggcattagaaagaagatttcacctggtgaatttacttacaatgtaattgatgaagagagtgtagaaaactagatttcttaaacatctgataattcaagagtttcctttttcctccttattccttgttcctatatgctttataaggcctcaactcttttctggttcatcaaaaagtgcagtttaattagatgaaaataagcagcacttaaattctagatacagaactcctactcaaaaaaatatagaagtcatctgtccccaggaactgtgtattttatactcacttagttattacaccaagaaataacacacagagattgaacaattcagtacaagttaggaagtagatcatgagtctgttaatttgatgggccaggctttgttaatgatttgtttcttttggttcttacttacctgttctatgaagtattccaaatatattttcattagaatgtaagctcactgagaacaggtagggctttggatgggcattattgctcctggtatgacactcaaaactgcagtcatgtttcagaagtgaacttatcattttacatagatttttctgcttcatattctattcagaatgatttgtattaaagttgatggaaagatgaaatccacattaagattgttatttactacctagtgccagttgttgtagcaaatatcctttgaaccccaggtctattttatcctatctgttgatcacttcctttgcccctgctcttcaagcctcctcatctctgaaaagctctccttccactgggtgtggtggctcaagcctataatcccagcactgtaagaggccgaggtgggaagattgcttgagcccagcagttagagaccagcctgggcaacataatgagaccccgtctcttaaaaaaacaaaaacaaacaaaaaaacctccaagtgaacgaacagtacaacaagtaataaaggatataaaagatgttctcagatctcaatatcaagtcagaagattttataataatattataattacacggagactgtccaaatatttgtatttgttgtgctacactgcattatgcaccatttagggaaacaacagcctaagtaatgtggttttaaataattaatctcatctaccaaatacctgtttgatagtaaagttaatgacctgtcctcaccttatgtttttaaccattatggaaagagaaccacttgaaaatatatcattccactgacagataattacccagctgtgaagcacaggctggagactggcaaggagaaatggagagaagcctataaaataattctttctcagggaaggagtttattcctgccaaggctttgccatcaaccattatcagatttctctttcatcctccgaacagattctgggctcctttgatgtggaggtacataattcaaaaagttgggtcacttgtgacatgttaagcaaatttctcagttctggttgtgtctgatgtgaaatgagcacgttgacactaactgttcttgactactatgggactagataatcatttgctatttcctgtaggtacttggcgtgttgaatcattttaccatattttctcattttatgaatcactggtccttttccattggacctgaaattagaccctaatatgacaagtagagcatatgttgtctcttactttgttattaaccttagattagaattaaggaatataggtgctgcttttttcttaggtagtggcaaattttccaaaggtctcaagcccagagtataatacagagttgataaaataacctggtagagtatgtagagcatgccttgtctttcaggaaaaggaactgaaaaacataggttttccaataggtgtaacataggtaacatagggacataggtgtaactgatgtacattttacttgcacttaatagacaggcagtgttagttcttcgtctctcttcacaggctatacaactaccaagatccagagaggttgaatttcttgctataactcacagcaaataaatgggagagtcagcactacagtccaagctctcttgattattggtccagtgttttttacagtatacacaaaaatttgttttaaaacaaatattcactatgaattagagacaatagcactaaaaaagaaactcacagctatcgttgtgttgacagaggagacaaccatgacctagtataggataaatctccatgtgatatgttttctactttatagtagtagtaggtaacattcttacatattattcctgcttaacaaagaattactgttcagcattaacataagtatgctctaaaatctcttgactgtatccaaatatatgttttagacaagagttttttttttttactgacctagcaaacaaaataaaattatcttaaacattaagcgtgttaaaattcaaaacaaagcttgaagagagaaaaatgcttgttatgtgtggcatacaaccttcctaacctctttatcagatgaaggatccagtgtggcactggattatttttctgtaatattttgcctcggacatatgtgctatacatttcttgtctgcatggggaaagtatgtcaggttgctgttgccactttcttcccatggagtggataatttcccttgagaataagttggctttctcatctcaccctttgcttttggtagtacctctggaaccagagggtaagattcatcttaatcatgtgaacattttattaattatctcatgtgtgattcaagcacatcattactgttactcaaggagaatattttctttgcaaagctttcaaccctttccatttgaatgactgctcttcatggtgtaatagatccactgttgaaattggcacttttctgtacttgtctctgaccagcaaaggcaaggaacattgcgtaaaataaattactgttgaattattggggcaaagtcaggttaatagcttaatccaaaaaaggaattacaagtgaaagaattttaccttaaatgtcattctgtttcattttgtaattaagaccttccaaatgtgtaagtagtaatgaccagaaatcttatcagatatggtcaaatgagaaaggtattcaattcatattaattttgaattttattgttttaatacaattttaggaaaagcatgccttgttttctgggtttcttggctgcctttgtatcaattatctacagctatcttctttagcatggaaaggatgtatttgaatactgtgacattttataccagggtaattctttgaatttatgtaaacaacaactctcttgagacacatcagtacaacacaatagtcagaaatgtcacatgagagttcaccaaactttaaagatggcgatgaggatggaaaaacatttttattgtagactttaaggatcttgtaaatccccgtatgtaatccagtgtgctagagaattggtgcccatggcgcctcctctccccaccgacctgcactgtggaaatcctactaattttgaagtcatgggagatgcatgtgtgggacctatacatgcactgtgatgagaatgatgacttcatcattctcattatttaatgagcccagctgctgcatacaagaaggatgcaaattcttgaatgttcttgattgtttacatcatggtctcataaggaatgaccagaattgctgggcatttcttcatcaggaaaggctaatcagccatccttggagagacatcagactcctttatatgtggccttcccatgggacctttgaatggtcaacgttaatcatgcttcagaaccagcatactaagtaaaagaaaacatgtccggaaaagaaatcttatcagtgtttatctcccaacagtgggattacaggtgattttgattttatttaagcaattttctatgactttgtataataaatgagtagcttttataatcagcaaaagatagactatgaaatcagtacatataattttgtatttgtatgtagtaccattgaaggataatagaaaaaagtcaaaagacttgaaagtcgacacagaatgatcattaatttgttttatctcttggtagttgtactttatgagctttatacatacagtatgggaaaatacactttagttttgaaaacaccatgatgccaaaataaaagaaaataacgttcattcatacgatcttcaacaaaatttaagcagcattaatcatcactgattcttcaggaagattcttgatcttccttaattttttttccctccaaaattgcatatggcagccacatttgtttcaggccagaaggaagaatgggaagagcttacatttatctcacagattccttctgggtgaggaagacttagaaagtgaagccctcttccatttgattaagcaagaacacctataaaaatggtgtcttcggccgggcgcggtgctcacgcctgtaatcccagaacttcgggaggccgagatgggcggatcgcaaggtcaggagattgagactgtcttggctaacaacggtgaaaccccgtctctactaaaaatacaaaaaaattagccaggcgtggtgcgggcgcctgtaatcccagctactcgggaggctgaggcaggagaatggcgtgaacccgggaggcggagcttgccgtgagccgagatcgcgccactgcgctccagcctgggggacagagcgagactcagtctcaaaaaaaaaaaaaaaaaaaaaaaaaaaaatggagcccttctaggtaggtcatcctccatggctcactgcagcacttccttggccctgtcccaagttccataattgcctcaattgcattggctcctgcttgatttgctttctaaaactcaggacagaggatgagttgaggagactgacttttttaacaatcgcattttgaaaagaaggaagcgtagtggtgtttcttggctccgtttccagttttgtttcttttcattttaattattgtacctggtattgtgtcctctttctgggacttttaacaactaatgttttgattgataagagctctaatagcatgggtgatttatacttcattacatcttcagttttgtcttctttactggagttgtattcaggtgtcattaagtaacgaggcattaaaaagaaacgataacttttgaaaaactgctgttatggcttatgagtgggctttgctgatattttcttgaagcacagaatttatctatctctgtaggtcctagatgataggtgagaaaaagaaacccagcttatttggcatgatattgtcccaaggcttgttagtaattgctttgaaaaatgaatagcaaggctaatggacatctgatttgtagtacatgctaagaattgcaaatgtgtgctcaaaagaaatttctctgattacaaaagtaacatatattcaacgtacaaagttgagaaaatacaaccactagctaaaaataatcaaaaccatttggcttccttgcagtctacatttttttcatgtatgttttgcttttgtttttagtgttatttaatcgtttcctgttttgtgacttgctttttacacctaacatttttagaatactctacctgtgaaattaaatattcttggagagcataatttttaatgtagcatcacaccagacactgtaatgtgtttactcttttttatggtcatttaggtggttttctttattttgtggtggtgtaatagttgttataaatgatgctgtgataaacatcctggtagataaatttgtgtttagttgatttttatataacagttattggcggaatgccttgcaaatcttatagttggtgtaataaaatatatgcgccacataattgtttatgaaaatatggaggaaaattttaatactgatttatgatcctgagtttaacataagcatggatacccctacatttagctatgatttttttattgatagagtaaaagcgcctgtaatttctacttaaggccatttaaaataattactatttaaatctatttaaacaattttaaatattgcttttccaaatttccaccttaggaagtagttaattgaatattctcagagaaataagtcctacaaaattgaccaataaaaggtcagttacgtattcattgtgtacgttttattgatcacccacagtgtgtgagcccctggaggtgggtgaaatgtgggcctccctcttacagagttgatagtgggcctgaaggggatgggatttcagctcaggaatttaaggaagacttgacaggaagtagcattgtgagccaagatttcaaggataagatttcaaggcaagaaaggagatgtattttaggtattcagacagagggtcaacaaagtctttaaggtaggaactagttcacttttcaaaaagaagaggtaattggtcatgataagagtagtagtttttaaaaatcattactgttttcattcatttataatgaatactattattttataattttaaagtttatatccaaataattgttttcaagatggtaatgaatgtatattgcttttatgtatacacatagtactttttgctttttggtaactaagtttataatttttgagggcaggaaatatttttgtttttcacttacaaagaaactatattttaataagagttttttgacagcagtgctttatgccaaaggaaaataaagcaacatttaacatatcaaagaaagccaatgcaaaacaaggattatttatttatttatttattttattcatttttgagatggagtttcactcttgttgccccggctggagtgcaatggcgtgatctcggctcactgcaacctccacttcctgggatcaagcgattctcctgcctcggcctcctgagtagctgggattactggcacccgccaccacgcccagctaattttttgtctttttagtagagatggggtttcatcatgttggccaggttggtctcaaactcctgacctcaggtgatccacccatcttggcctcccaaagtcctgggattacagacatgagccatcatgcccagccaaaacaaggattttatattcaatcaaactgacattcagatatgatcacatgaaataaatatcaacgtacaataactcagggcatattttcacattattttcctgtagaatctgctagagaacaagtttcagatacccaaaatacctagagaaaaactgatataaggatgggtaatgagcattaaggagaaacataaaaactaagactcaacgatggtaaaaagtatgataatatagtattccacagctacatgctgtgacaataaagagattctgtaactgtcaggcctctgagcccaagctaaaccatcccctgtgacctgcacgtattcgcccagatggcccgaagcaagtgaagaatcacaaaagaagtgaaaatggcctgttcctgccttaactgatgacattccaccacaaaagaagtgaaaatggccggtccttgccttaagtgatgacattatcttgtgaaattccttcttctggctcatcctggctcaaaaactcccccactgagcaccctgtgacccccacccctgccccccagagaacaaccccctttgactgcaattttcctttacctacccgaatcttacaaaatggccctaccccatctccctttcctgactctttttcggactcagcctgcctgcacccaggtgaaataaacagccttgttgtgacagtaactttaatggggaagaatgagaagaagatgtgggtaaagaaacaactgtttttctattaatggtggtagtattagtgtgtaattctgagcctggtgcataagtaatatggtgtaacataagtgaatagttgtgtgatattttaattcaatcatcccatgtatttgagaatcagaattttgatgtggtaaaagaagattcacatgtaacatataatctattaaaaagataccctgtagtcatgagtttgacttttaggtatcatttctcagtataacatattgttgtagatttcagataacattttttccccataaatactgtccgctgcaggcctaaaaataatgaaaaggcctaaaagaccaactcagtagcggtaaacaccagtactgcacctagattatggtctttaggaaccattttccagtaaaagataccagtaatctttggaaagcaggatttttttttctttttttttttttttgagatagagtctagcttcgtcgcccaggctggagtgcagtggtgcgatcttggctcactgcaacctctgcctcctgagttcaagccattctctgcctcagcctaccgagtagctgggattacaggtgcctgccaccactactggctaatttttttttgtatttttagtagagacggaatttgaccaccttggccagtctggtcttgaactcctgacctcgtgatccacccgcctcagcctcccaaagtactgagattacaggcatgagccaccacaacccggcggaaagcaggaaattttttaaaagctattttaattcagtcatgtaaaaaaaatgagcagaaagaaacaaaaaacttaaaaaaaaacttaaaaaatgagcagaatcttaggaatcacctgcgactttggttattcatgcttagccatttctataggaaattccagcactatttgagttagaccactaattatatgtgtgttgtagctttctccaagagataatggaattcacaaatcaaaactttgagattattaagtgttacaagtgaattataaccccagtcatttgctttcaaatgaacagctaaacatattttgtgttaatttcttatggatgctgctttgtttgtttgtttgtttattgagacggaatttcactcctgtcacctaggctgaagtgcaatggtgagatctcggctcactgcaacctctgcctcccgggttcaagtgattctcctgcctcagcctcccgagtagctgggattacaggcgtgcaccaccacacctagcagatttttgtatttttaatagagacagggtttcaccatgttggccaggctggtttcgaacttctgacctcaggtgatccacccaccttggtctcccaaaatgctgggattacaggcgtgagccaccattcccggcctagataggcttttagttggtttccatatacagtgtatatagggagaaacagactaagacagacactggcatccacagaagtaaaaataaaaagtaaggtataatttaaatttcacacggtcatggtcacatttttcagctttttgcacctatgttgtataaaaaagacaaaaatgcctttagaggctcaagttttcaggacttcctgaagctgtgtcatagtttaaaaatgccataaaaatgccgtcagatttaataacgtatcagctgaacactggatttctgttatgttgagtcttcaaaaatttctccctgtatgaggaattaatactgttatgtctgatctggtggtctgaaatgtgaacttttctgggccaaccagtaaacagctgctgttgctttatagctgcgtaattcagtcttggaaattattagataattcccacaccatttcagcttgctgttttaccataaatttaatgtgaacagtatttctagctaacctcaagctgtgtttattgtcgtggaattttctcttttattctgaggtaaatgattacaaatggttatgatgaggaatcaaagaagaaagtggactttcttcaaagttctttttctactctagccgcttctgagcatctttctcaagcactgtgtttccatcagtccctaccccaagcagagaaaggaaacagttttcccctttgtcttcagaaccctcttctcatcgtgtcattttccaaagcaaataaaaatcttgagatattgtcttgagtttgattttttttttttttttttgagatggagtttcactctttgttgcccaggctggagtgcaatggcacaatctcagctcaccccaacctccgcctcctgggttcaagtgattctcctgcctaagcctgccaagtagctgggattacaggcatgtgccaccatgcccagctatttttctgtttttagtagagacggggtttctccgtgttggtcaggctggtctcgagctcccgacctcaggtgatccgcgcctcggcctcccaaagtgctgggattacaggcgtgagccaccacaccctgccgagtttgatgttttttttaaccattcaagccagtaaataactttccagacagctgtagtagaaaacagaatttgtgtgtgacaaaacttaagattttgggattgagagctctatggtttatgccatgtggataattgtagccagatgaagaatatgaaatttaaggaagtgtttagagtggtacagacagctattattacgattcttggggtagaagagtagcttacatacaacataaaataatggcattaactgaattaacttcagcctttgccatgaaacccaagctttcattatgttttaaataatgaactacattaaaaatagtatataaatatgtaaaatatattagacatagacttctcataataaattatgggaacttttgatgtatttcttccctaggaaaagaactaaacaagtgcttctttgtggacttaaaatttttcagtttactattgtgaattaggtacagcatatctttataattccagataatacccataaaagcagaactgtttatttacttattatgaagggaatactgaaatgaaattaaggacaatttttttctcacgtattatatttttaaaaagttatttgatgtttgtgattaaataaagaatgaatttttaaagccagttctcaattagcactgaggaaaagaatatgctttttttcaggtacacaaataagcatcatggatataagaaacgacataaagatgaatctacagtctggattaagacgtattttaatttcagtgtcaaaggctgttaggaaatattcagattttagtacttgacaaagaaggttctcaatatttgtttcagtgttcagtgaaaggataaattctgtcgtctttctcttttatcatattagtcactgagtggtttcattaaacattccctcttccatatcccctgataaatttcaacttgttggtgatgcatcccaggagtgtctgtctttttttttttttttttttccttctcctgtcagtgagtcttaggctttggctttgaaaccctatagtgaagggaaatctcaggcaacagctgtgcaaccgtctggagagcagctagtccagattggaggagacgaacgaggctggtcgcaggagagaggcctccaggaaaaaatggcattgatgcattacctgcgttaaagattttcctgtacttagcatgcttcttagggttctactggagcgtttgggaaagatacagtattgatggatgcatagaaaatgaggcaaattttttaaatggggcaaatattaactgtagacaaagaaaagccaaaagtacaaaataacagcgttgtaagatacgaagataaaaatacgcctaagtatgagcgttctggcagactcacaatacagatgccatatatggggtaaaaccataccagtaggatggtgggaagggaaaggggtgggctcatgttccatagtgggaagacctacagcggaaaaatcaggagaatagttatttaagcacagagtttagggagtaagttgcagaagagacaactaaatgagatggccgtgaatgatttttatgacctcctcttgttatggagaaatcgatcaaggaggcctatatttgatggcaggaagaagttgagtttaaggtttccagacatttgttttaatctggaaaatttctttttttctttctttcttttttttttttttttgagacagagtctcactctgtcgcccaggctggagcgcagtggcgcagtcttggctcatcgcagcctccgcctcctgggttcacgccattctcctgtctcagcctcttgagtagctgggactacaggcgcccacaaccacgcccggctaattttttgtatttttagtggagactgggtttcatcgtgttagccaggatggtctccatctcctgatctcgtgatccgcccacctcggcctcccaaagtgccgggattacaggcgtgagccactgcgcccagcctaaaatttcttttaagcttagaagttgcaagtcaagttactgttaaaggcgtcctaactttgaattagataaagctaaactgtggtttaattgagctgagtttgttgtatgctatatctcaacttcacaagatgtttgctttttcttggctataacctaagattatacaaatataaaattacctttatgcccatttgatagactttagggctgaatttccctgtgtaagatgttgtagaggtttgtacttgtgattgtttttactctagaagcatgtttatcttcactcctttagtgacacgtgtttgttcaggaacttcaaactcaatgtgatcaaaactagactcatgttccctgaatagtctctcctgactacaaatctgttggaaacttccaatcctaattaataattgtaaactttttaatgtaagtcatatgaggggttgttgtgagcataggaggtagggagatggtagtgtgagctggagcatatggtaaaagttgtttgaaagaaagtagacccatgatgtggatcctgagggatacgtaaagaaaatgaagaggtgtagatttaaaaatgtttatggggcctgggcgtggtagctcacacctgtaatcccagcactttgggaggccgaggtgggcagatcacctgaggttaggagttggagaccagcctggccaacatagtgaaaccccgtctctactaaaagtacaaaaattagccaggcatggtgatgggcgcctgtaatcccagctactcaggaggctgaggcaggagaatcacttgaaaccgggaagcggagattgcagtgagccgagatcgcgccactgcacgccagcctggatgacaagagcgaaactccgtctcaaaaaaaattaaacaataaataaataaatatattcatggggatgttccagggaaagtagtttgtgttggtagccttgagaaataataatagaaaattagaatagaactaagttggttcattaaagttggaacacttgtagagatttttgatttggacagacattaattcatttgattatttctcttattcgatgtccagaaaaatatctgtacattcaatgtggttttatttgtactgcacatgtcattaataggctaaagttacctctaagatacctgctttcttagtccttgttacgctgtaaattctgggcatcaggatatagctttttattatgttagctcttttaatagatgatacaattggattggggaaaaaactgattatactctggagtaatactttcatagcctgtagtatcctgcaaatagctcctggtcatcttcgaattttactagcaaacttgtagggtaataggttgggacaaagtattataatcagtggctttgagggcctgataagaggaaacaataattgtgcagctatattgtgaataagtagtgcatgatgctgatggttaaccctttcctgcggtgctcaaacattgggaaataattgctttttgttcaaaatgtaagctcttcgataattgagacttttgtcaattcactgaaatattcccagagcttgaacatgtctggtacatagtacatatttaataaatatatagatttaatgaatgaattgaggatgtagccaaatattggaaaaggaaagggaaaagaaagaatagcccaaacattagaaagacagaagatgtggagcagcaatttcacatgcctaaaagaatttctgagattatggcaaaatcatttactttacttactccttattgatcaacaaaggaagagcaggttttatgtaacaaccaagaagtaacatagggatctcagaagagaagaaaccaagtgtctttggatcttaataaaaagaacattcaactccagaaatagggttaaacctatcctacacatgtctagtaaaaagtcagtgtatcagaggcatctgtgtttagagataaaacataccattagattcatttataatagtttcattgtccttagtttttaaggctaatgataaagatttttttttttttgtgagacacagtctctctgtcacccaggctggagtgcagtgacgcaatctctgctcactgcaacctccgcctcccgggttcaagcgattctcttgcctcagccacccaagtagctaggactacaggcacacgccatcatgcctggctaatttttgtatttttagtagagagggggtttcaccatgttgcccacgatggtctcgatctcctgacctcaacagatctgcccgcctcggcctagtgctggaattacaggcgtgagccaccacgcctggccttaagaattaattttcacagaaatctgcttctaaatattattcagtgataatagattttagaaatttcagattcttatgttgtaccttaaaggttaggatactatttataaatgctaaacatgaactcctgtcatcctattttaatgtctttattaagtgattacatgaatgtggcgtttcagtaggtgtttggtgtattaatagatgtaggtactcccctcttaaacctttaagtattttcatgccatgaaaaatttggggggcattctctttatttattgattaggtacctgtattttcaagaatattactcagcttcagttcccccaaatcttttttagtgttaactaccttccgagaacgtggtataacattttaaaatatattttttgaaggtttggatgtcactgaagatccccctatttattggatggtatctttatcagctgggaagataattagtttcccaatgttgctatatttttatgaataggtcctgtagctcttgctttcttgaaagcttagaattgattgtaagccatggactaatgatattctccaagcatatttaacatgaataggctcatgttcagtatgtcaagaagttaccctgttgtactatttaaataatttgagcttagttttctttttccacctttgttctaaattcttaggtgagtctgaattcctgggcatctgtgcacacagcttcttcagtaggtcctttactctcattgtatctgatctttgacttcataaagacccttggcctactgaccctgtatttaatttcacatctcaatagtatttagccttctcatatttttcctcttctttagagctccctgatccctcactccagtcattcaactctgtgtattcctttaacttccaccctcgctctgtctcttcacagatatgcttctttatatggtagtcagaagttcctgtgtgatcttcgtaacctccagttccctccacagtcacctgttatcaggcatctgttccttgagctccagggaatgagctctttgctatcattctggttgtcggactcactgggcactgttgtgtcctccacagtctctcagtggcatcggttgatgggtgcattctccccacactgatgtcattctgctgcttctgattttctttctgctgtcctccattttcctttcaggctcccttccccgtcctccccgcgccaccttttgcaatatttaggattcagaaattccaaatattgcaaaatatttagaatcagaattcagaaattctaaatatcagtgtttaataggagtaccctggggttgtccattttctcacacaacacatacttgctaggagatctcataagtgcagtggtttttcagaggcctgcattgatgattcctgagtcattatgtccaggccaggcctcatacatactatttactggttctctttctgcgggtgctccaccaagaattcagactcaatggaatatttcttctaagatgtacaccagttccttatcaaaaaatggcaaattcagacttcttaggttaaacagagaactcgtgaacatggcatatgtctgttattccatttttctctgttggcttattgctgagtaccatttgggataaaaatctgtttcaggcaaaggataggattgttttcagcttttattaaattctcctagacccttgattttatgcagagaactaattaaatttgaatgaatttaatgtagaaaccctgctattgatgcagaaatcaacctgattctggactagcaccagaatcaactatttttgttgtttttgctttctttttttttgcttttgctttctctgccggtaaataacaactagtatgtaagaatcaaatgaatcaagcataaatccctaggaaatatttatgcattcatttttaacaatttaaagatgtgaagatatataattaagcataatcctctcaaagtttgacgttgaaaagtatttcagatacttcaacttaaatatattttttgcaaaatatcttttttaaaaaaacagatgtggtctcagcaatgtaattattacagtgtgaggagagcttacagttgtaccaaaatttataactaggaagaagagaatgtgaaataatccggaaacctacaaaactgtcctatacaggaataccaattaaacagctactaaaaatgagtgtaaaatgacaatatggctttatcaagtgcttagggtctggaaaaatgcacatattgcctgttatttattgttatacttaatgaatgttcttttgcacgtgagaactgttataaaagatgtcttttgtacatacttggtacaccagttggctttttaacccattagctgttttcccccaaaggtggcctactctagatgacgttaaaaatacacattttccagggacttatataaatagtcaactgccctattatggaaacttaaaagcgaaggccctgaaatatccagacagtttgaacataaaccaaaaatgaagtgaatctctagaattgctgtgtaatagcgtgagtggggagggggtccctcaagagagggaactgacctttttcttcctcgtgggtgaccttgagtacacactttatttagtcattaaaagggtcacctgaagcttagagaatgaagatcctacagcctgttaattttatcattgttagaaactctctgcctttggcctgaaaatggtaaatcacctttcttagaagattctcatatccagatattcttaccaaatcagaatcttttccagcattttcttcaaaaaaccacagttctgggttaaaacacagcagatcctaactgtaattttcctttcatgtacattttagtcatctttataattttaaatgaaagacaggaactacattatttgaaataagggttaaccccctctaattataagcattaatcacacacagttttctcatttctaaatgttaaatataaaatgggagctatctcttcagacacttttctgttgccttctgtgtgcggcaggaccttacttttaagcttagtttgatttaaaggctgagtttctgcttgcttggaatgcttgctcttcaaaatatttgctccctggagagggaaactgaagatggagctttcacgtgactttggattgctgacctggaagacgtttggggtaataggatgggctagggcatggttccactgctttctgtttgagtggggtcaggaaaggaaggcggggctcgctgtgtgcaaacaggaaaacatagtctgaagatgtttgaagcctgagtgcactttcatttgatgccttgctttattgcttaagagaattttaaactgccgaatccgcaaatgtgctgcagcctataatgacacatatttaaatgatttttgcatctaaacaaatgcattcactctttgcctggtgtgtacaatttgaatgacactcgtgctctgcctggaaggaacagacgtttttcattataaaattcagtcaagcagaaaagtagcaaaggaagcagaaatttccatttacatctatgattgaagttgtagtgataaaagaggatgactaagttgaagagtagccttgttctcattctgctatctgacatgggatcttgtcactttggtaatagtttttaaacttacattattgaggaaggctctgatcagaagtctcaaattatacatgttcttcaaccttagatttttctgggtgttttgtttcaaaagtctcaaattatatatgttcttcaaccttagatttttctgggtgttttgtttggttttttggttatctatagatagatttgagtatctctttttttcttaaaatccgttacttactagtaataaagacttaagtggtagctttacgctccattatcacagagattcacagtactttttagtttttacttgtgagcctcagcaggtgtagacagataccttagttgccactgataacatccagttgccactagatcaagaaatggttcaaaattctccaggggcattttctgctaaagaagagttggtgatcttccttttggaagccttaatgtacttaaaccttcttccttagaagtccagaaattcaattatttcagctctctgtggagtgataagtcctgccaaattgatttacaataatgaaactaagccttgtttacaaatctaagtggtgatttctaagtccacagaggcgtggtaacagagagagagattctgatttatctgggggtctatccgtgtttgaacagattgtgtgatttttgaaacatgattcaaaagggatgttgataaattctaaaatacatttttattgaagagcttgatgaatcatgtatacttactttatttgttattctattagatattgtcttcctcatccctaggtggtgttgctagtacagtgacagaattcaaatccttctttttcctctgctctaacagagctttgtgaactcatagcaatattgtaatgcctggtaaaaggtggtgccagtttcaagtactatatcctaattacttcatggctaactcttgttattgttaacaatattgttaactcttttgttaaatgcagtgacatcttttttctttctcattctctgtgtactttttgccctaaatagttctgcatcttttaagatacaagtttgctttttcttggaggtttttatttggaaaatgcctgaaatatatagaccaacatttgttcctccaatggttaaattacattgtctcccaaagtgaggcattttaagtctggactatacccaggagaatctaaaagaggcagttaataagctcttgaagagcacagtggggtggttgtgtatttattgagtctcacacttaggagagaaataggctggaccaaatgagcctgggcatcaaaagcatgtgggtggtcgttggtgatatgtgcagtgatgagtgtgtgtgctgagggtcctagaccaggctggcagggaaatgaactgaaggcagtgaagcctcccctgataactgcagagagtgctgcagcatccaggacctcaggatcatgatgaacaagctgtagtggatggaagggagaggaactatgggaaggatgagtttctggccagaaagtggtttactggagtgctgtgtctgagtattacatgatctgaggaccatgaggtccagctttgggagtatggagagtttgagtggagtagagttatagtcccatggtcttctgattcacagacattcatgagcgataagtatctattgagaaagtggaagcatgatttttatgacctcctcttgttgtggggaaatcgatcaacggggcctatattggttgggttctacaaccaaatagaatgtgttcagcaggagtcatgttttgggctcctcacaatgttcagtgttagttctgttcctttctcttgcttccacataggaaagactttgacccaatgaggaattagtcattgtcctttgggtacacttccggaatttgataatcagttgggcacttgattctagtacatttgctaaaagtaattaataccctgcaattggaagcatgcagcaagcgactgggaatgctaagtgaaaggtcagaattgaaagagtggaggaggctgttgacccttaggcatggatgatatgtctgagtgagaaagcaagaagagtagaagacagagccttactttataatcagaattatgaaaagaggagccaatgagagggaaagaatgattggcttgagatagattggtggaaactggagaagattgaatttaaagaagaaaagtgggccaagttcagtggcccatgcctagaatcccagcaaattgggaggctgaagctaggagagttgcttgaggccaggagtttgagatcagcttgggcaacgtggcgagacccctgtctctacaaaaaataattaaaaaaaaaattagccaggcatgttggcatgtgccggtagtcccggctacttggaaggctgagacaggaaggttgtctgagcccaggaggctgcagtgagctatgatcacagcactgcactccagcctggttgacagagggtatccccgtctctttaaaaaaaaaaaaaaaaagagaatgtggcagagtagtcagagaactggagggctgagaagagactgatggcatttgttgttcttgaccttgaaagaagagttgcagattgttggagcaaggccagatggtaataggttggaaagaacaagtgaggggcgtgagagtgacagtctacaaccccgttaagaagttatctgtgaaaatgcctcttcctgtcttgattatagcctccctcgcacatggctttctgagtatggtatgtgaaaacagcatgctgtatatttttaccttcccatatgagttaaggttttggtaatgacttgtggttcttttgcctcacggaacaccaacctggttggtattttgtcggcaattatgtggtttttaaaaagccccgtatataaccttaattaattgcgtctctaaaatctatcaggctttgagttttttgttttttttttttaaataaggcagaaagaaaggaaagtgttaggagaaagcaaccagtgagaatacctatattttgaagaaacaaagtagggaatttagaattatctctactatatctgctttttcagctcatctctcgggatacagaggactgaactaagctaaagtaggttcaagtctaaaggaaaccttaaattaatttctgtattagaattaatcacacacctataaatacaatttatgatatgagaactgcaacaagagaaatggggggagatgagcagtttgctgatcaatagggttaatgatggtaacatagaatcctagtgatatgcctcccattgactaaaatgtatgcgttaagatagcatagcgcataaaatggtgtactgcagtctcagtgtattcaagcttattatggtttctctgcctaggtttgtgtctttggctttagattttctcccataaccccaacctgtccacattcaagtcactactccttgaaatatattattgatctctaaaatctgatgctaagtctgtcttgcccaacggtggccactagccacccatggccattgaatatttgaaacctggctagtccaaactatgctgtgagtataaaaaacccaccagatattaaaaagttagtctgggagaaaaaaacaaatgtagaatgtcttaatgataattatttacattgattgcatgttgaaatgatgaaatttaggatgtactgggttaaaatatattaataaaattaattttacctgtttctttttacctttttatgttaatgtggctacaggaaattttaaattagatatgtggcctctattatatttctgtgagacaaagctgctccaagctgttttggtccagaactatatctcggttcttttgtatcctacatggacctgcatagaatggtatttagtaatactcagcagtagcagagatgatctcttatcaaattatgttaagttttaatttttattcttgtctctcaccctatgtgcacctctctggccaggaggcatttatcatatcaccttttaatatttggaaatcacttgatctgcttgagtcattgtgttgttttcaaatctagaactctttctaccttattttgtaacttctataattaaacaaaaggcgaaccaggagcagcttggctcttagggatgtgtgaaaaggcgctcagtccttaagttggtgccaaaagtgacaaatctataggatgagatgcaggtttatggaagagaagcatgaaaatttttattttttaaaaggacacagcaagctagtcaccaaaagacagatacttgattctacttatatgcggtacctttttgaatttgaagagtcaaattcaaaaagatggaaaacagaatggtggtttccaggttctggaggtgggggaatggggagtggaggtgggggaatggggagtggaggtgggggaatggggagttgtttaatggtgtgcagggttttagtttagcaagatgaaaacagttctggagatggaaggtagtgatggttgtacaacgatatgaatctacttaacactaaactgtataattaaaagtgggtaagcaaagagtgtcttacaaagcaataacttgtaacttaaaatttttaaaaaccttaatgagattagttgtaatgggttatcttaagtagacccttactgccggaaggaacagctgaatcacatcacttgggagcttgttagaaaagcagactcagtcccaccctagacttgtccaatcaaaacctgcattttaacaaggcccccaggtgattcataggcactgtaaagcttgagaagccctgctccaaatatcatttctcaaagtgtgatccatgagccacctgaagcagagccaccctgggaaggtctgttttcaggcgcgtcccagaacacgtaaatcagatctaggctgtggagctagggagaagatgaatctgcagactgatcaggatcccaggtgattttgaagcatggtttgagtttgaaaacccctaatctggaaagctttaacaactattactcttacaattccatcttttaacgaatgttggaattattaaatacttgtaacaagaagtcctgttattgataaaatcaagatatgactaatagtgcagtcaaaaagaggcaacaaaaaagcacctataacttatcttgggttggttaatgaggaagctgtcattcaaaattagtaagactactgtaacatttcttggggtcctgaacattggaatgagagtcggttttcagagttgagcccacctctgtcattagctttgtgcaaacctcatcaggctcaagattcctcatttgtaaaggggaatgaattctctgaccagttagtttacattcctaagacaaggttaaatttggaaagcaaagaattttcggtatatatgtgataattttgaaattcttgaatttttaaaaaatttaaatgccacattacttatatttttttctaaaaaaaagtcaaaccaagcgctgtctagttattaatagataccacagatgagatgcctgagttggtaagctctttttaattctagttcttttcaactacaataattttatagacttttttttgaaggctagaatgttgatgtggaatcaaataggtatgcctctatgtatggtagatgcacctgacagggatcacttgacttgaacatgccctgacaatgatcctgtgtggcaggtgcacctgattctgagttctgagttaagaaatccgggagtgggccgggcggggtggccggtgcctgtaatcccagcactttgggaggccgaggcaggtggatcatttgaggtcggaagtccaagaccagcctggccaatgtggcaaaaccccgtctctactaaaaatacaaaaaccagctgggcgtggtggcgcaggcctgtagtcccagctactttggaggctgaggcaggagaattgcttgaacccgggaggtggaggttgcagtgagccaagatcacgccagtgcactccagcctgggcgacagaatgagactctgtttcaaacaacagcaacaacaaaacccaaaacaaaaaaacaacaacaaagaaatccaggagtggctaacccagagagccattccttatctgtaaggaacatctgagccctcatctccttctgtggaacatgggcctcgccggggattgagaccctttgttatgagttaagtggaagttgccaggtggagattgttagggggagggtgttaaatgagaatgctgtagagaccacatgccttttgcaagcggctgcggttcctctgtccaacccaccaccactggactctctaccctgtatgcaagcccccagtaaaaccctatgagacatacggttcactagctctgggcctcttctggctcttgaacctggtgccatccacattgcagtcagtaggagtttggcatgacaccttattatgtgaacttttatatcaagccattaaatttttttaaaatagactttatattttacaacagttttaaatttacaggaaaattgagaggatagtccagagagttcccataggctttgcatccagttttccctattgttaacatcttatattaatatggtacatttgttgcagtcagtaaaccaattttgatacatggttattaactaaagtctatactttattcagatgtccttagtttttgtctaatgtcctttctgtgttccaggatgccatccaggaaggcgcattatatttaattgtcaggtctccatagcctcctttcctcttggctatgacagtttctttatacttctctagttttttaataaccttaaaggttttgtattggtcagataatttgtaggattcccctctgtgggaattttctcatgctttgcctggggttattggttttaagaaggaagaccacagaggtaaaatgcccatttcatcacatcatatcaagggtacgtgtttatcaacatgatacagccctgttggcattgaccttgatcacctggctcaggtggtggttgttgagtttctccacttgaaaattactcgtcttcccactttatgtgctctactctttggaaggaagtcagtttgcacagcccacaattaaggagcagagaattatgcttcattttcttgagggcagagtatctacataaattatttggaattcttctgcgcaggagatttgtctcttttttcctatttatgtattcattcattcagtcatttagactcatggatatttacattgtactttgatttctaatccagcactacttcataatttttattgctcaaattattccggctttagctattagaagccctttcacttggttcctatgctcatttgacatagcctcttttttttttttcttacaagatgctgcagtctcatcttgcatattttcagccctaatcctagaatcagctgttcctccaaggagcccttgttccttttattggagagtaatgttattggagaatagtattaaaatctggatgttaaggatgctcgttgccactggagtttctttgcttttaagacttctcagttgatagagcaaggcaatgtatttgtccatgttcacccttatgttatgcagatctataaatatttctatagctaactagttgtatttatattaagctataatatctagtctatattaagctaaatacaagttcatccggatgtttcctactctaacgtattaccacatggacactatatctctcctccttggttatgtataaattctcactccatccaccatctatgtacttaattgttcagtttcagtatatgtgcgtagccgtatcagaattgttaacccaggctgggtacagtggctcatgcctgtaatcccaatactttgggaggctgaggcaggtggattgcttgagcccaggaatttgagaccagcctgggcaacatggcataaccccatgtctactaaaaatacaaaaaaattgctggtcatggtagcatgtgcctgtagtcccagctacccgagaagctgaggtgggaggatcacctgagcccaggaagtcaaggctgcagtgagctgtgatcgtgccattgcactccagcctgggagacagagtaagactctttcttaaaaaaataaaaaataaaaaatataaaaaaatttgttaacccacacctatatggatctttttaaaagctgcaagactgctaacaaatatttatttatttatttatttatttatttatttgagacagagtctccctctgtcacccaggctggagtgcaatgacacaatctcagcccactgcaacctctgcttccccggctcaggcgattctcctgccccagcctcccgagtagctaagattacaggcacccgccaccatgcccagctaattttgtatttttagtagagacggggtttcaccatgttagccaggctggtctcgaactcctgacctcaggtgatccacttgcctcggcctcccaaattgctgggattataggtgtgagccaccatgcctggccataaatacttattttgttcccgtggttttttttttcttttctcttttttaaagtaaatcctttgcactatttttattattttaagaccagtgttattcagagcctgggttaaacactattctgtgtgtgtgtgtgtgtgtgtgtgtgtgtttgtttgtttgtttgttttttgagacagagtctcgctctgtcacccatgctggagtgcagtggtgtgatcttggctcactgcaacctccgcctccctggttcgggagattcttcggcctcagcctcccgagtagctgggactataggtgcgcgccaacatgctcagctaatttttgtatttttagtagagacggagtgtcaccatattggccaggctggtttcaaactcctgaccttgtgatccacctcggcctcccaaagtgctgggattacaggcatgagccaccactcccggccagcactattctgtcttatactcactctgccatctgtgtgtgtatatggtacgtatgtgaggctggatctgtgcacttggaaaagttggagagatgatttaggtaaaacttttagttttcacttcttttgcctttttgcttatcttgatccatttagttcctaccatctggcaaatagttctcatctgaagaatcccatctgtcagttctcactattatccggtaatagttacagtgaaatgctggtgacggcaacagccactttttaaaaggatgtgtaattcaccctcatgtcctctttgagaacccagtaactgcccacactctgaagctaaaaccataacagttttatcacatggaaagtttgttgagaaatgtttggctgtttctgtgaagtaatcgtcccgtctcttgagtacagatgcctcccaggaaaattttcccagcctatttgttaatgtgaaagttacaaaagatagcatataatgagcacattcaagacaaaaaaatttgtggagtaagagtctgaaatggtaaaataaaaaatcacttaagaaaacatttatctgtagctgtcattttcatatacacatatctagtgtatacaagttagtaagtacataattctcaaaagttctacctgtctacacatctacacagaaaaattaggaaagtcttgtccagacttttccatcatcttcagtataaagcatcttctagctgttggaatagaaacaagctagattcttgactcctttctatttgattatttagatctgaccttcagacgacatccagaatctgagaacacgcaccacctctactgctctcatcctggtccaagtcattgtcatctcccacctggattaatgccagagcccccttcctggtcttctcacttctagtcttgaccccctagggcaagaataattagcttagaaaaccaccccagagccttccagcattactctgagtactggccagagttggacaatgtttaaggccccgtgcagtcagctgtccctgtcctgtcctggctgtcactcactcgcttgcccactgatctcttccacatcattcctccacgacagcactgatctccttgttcttctgtgagttcaccaggcatgcatctgcctcaagactttgtgtaatacttgttgcttcctctggctagaatattcttccctttgattctgaatactttgttccctcacttcctcaagtcttcactgaaatgtcatattttcaagtaggcattccctgaccaccctatttaaaatttcacccctcagaaaaaacaaacaaaccacccctttctctgctttatctatgtaacatttattaccatccaacagacactgtatttttatctgtattttttatcgcttccccgctaggatcatatatcgttttatctgttttgttcactgctgtattcttagcactgagacataattgtaagtatgcagtgaagagttagtggataaaggacagtggctgcaagaggggatttaggaaacaccccctcccagccaggaccagcactcggtgcaagagttgaaagagttgatcactcagattctctgcttctccagtcgtagggactccaccccgctgtgttgattgctgtcatgtattcaccccatcataagcagtactcacatgtaaaacagtaccatgtcatctctgtggggctacaagtaggtggtgatggtgcaatgaacatataaaaccccagtgtcttcagtaggtgcgaaataggtgattagtgaatgatgaagagtagctgttgctgttttgattactatgattattattatgagaaactactgtggttgatgagatagatactggggagaaggatactattaatataatttattgagcaactttgttctgggcactagttgagtactttagggatattaattcatttaattctcccagttctgccatttactctctatgtgacctggactgttacatagtctctcagtctcaccctctctttttttttttttttttttttttttttttttttgagacggagtctcgctctttcgctcagtctggactgcagtggtgctatcttggctcactgcaacctccacctcccaggttcaagcgattctcctgcctcagcctactgagtagctgggattacaggcatgcaccaccacgcctggctaatttttttgtatttttagtagagacggggtttcaccatattagccagactggtctcgaactcctgaccttgtgatccacccgtctcggcctcccaaagtgctgggattacagacttgagccactgtgcccggcccttgccttctcttataaagtgaaatcattgtagctgctttggtgtggttctgaggacggtgagagaagacgcacgtgaagtattgagggtggtggcaggcacacagttcagagttactaacaatactggtgttttatcttcacaaggcagatctgggcccatagcacaaggaaaccgaggctttggcattttacagtaattacattgccagaacatttcccccactttcttgaatcatctttacctcttgagagatgaggaagagagggcacacctcgggcagaagtccaaagacctcaggcatttttggcctttcattcccatgattctggccaacatcattttagtccccagcagttcatagaaatattgtcttttaatctgatattcaaataatctgtgccttgaagaacctgtgtatggctctagaatcttttacattaatctactcaaccccactctgatgctcaaaacttcagcagtctgttttttttttattttaatgtctttattattatttttttttttgagacggagtctcgctctgtcgcccaggctggagtgcagtggcgcgatctcggctcactgcaagctccgcctcccgggttcacgccattctcctgcctcagcctcccgagtagctgggactacaggcgcccgctaccacgcccggctaattttttgtatttttagtagagacggggtttcaccgtgttagccaggatggtctcgatctcctgaccttgtgatccgcccgcctcggcctcccaaagtgctgggattacaggcgtgagccaccgcgcccggcctaatgtctttattttaaacatttatttttagaggtagggtctctctaagttatgcaggctggcctcaaattcctgggctcaagtgatcctcccaccacagcctcccaagtagctgggatgacacccccaggtgccgccatcctggcagcagagtcagttttgatacatctttcccttctcattcttcccaatgtcatggattgggaagttactgtggttttagttgcagtactttttactctgaattctgtttgcttcctggaattctgtctgtcttttgaaaagacaacataaagaaatcgaaaaatatactttaaattccatagtgtgggagcctctgctactcgcctgtttgatattcattcccattttttcctttctaaaagaattccagattttttttgttcagggtgacaatgtgctctgctgaaaatactttcacagattcccttgcaggtgcatgtgaccagatcacagtaatggcacatatggcctcagtggaatttgctgaggagtatgtccctcccaagtaacagcaaagctttattagaggaaaaaacaacaacagaaaacctttcacctttgtcttgtttctcctgccttctgtctggaacttggacacagagtcttgaatttctgtgaccataaaacacgaggataaaaccaacgtgctcaggatggcagtacagaaagataggaatacgctggtccctgatggcatcatggaatatctgcagtggccctagcttcagtgtcacttcttaggtgagatacataatcctaccgtgtgtttaagccacggtttgacatgtggtctattctctgccgctgactgcattcccagctgttctatatggcttgctagctaatttaagtctagttttattgtcaaattgaccacattgtagattataatattaaagtacttcacagtctaaaagtgaactacttttgtaaaagccaaaggaaatgggccaaatgaaccattttgaacagagtttaaatgagtgagttgagttaccactcttggatggagaactggagacctggattttcagtctagttcttctgccagttggctctgtgggcaagtcacttgacctgagctcttttcctcccatctgcaaaatgaggtaatttgagctagacagtcctcccaaagaccaccaaagagctagcagattgaggcctgcagactcctattgaatttgccatccttgttcaccttgccaagacttcatagccaagaagccagacccagattttgttcattagctttgaaaacaccctttcagttgggtgtgtgtgtgtgtgtgtgtgtgtgtggtgtgtgacatgcgttttgaatataaattgtgaattgttttagcaagaaaccaggttgtatgtttctcaataaacatgcatactgtatattgatgaatttatccacttgaaataaatggtgccaaattgcctaaagtttgctgtaaacaggaacatgatttctcattatgatgtttaatttgttttagtctttgatctcttacatcagaattctgttaagaactctttttacctgaaagatcaaagcaaataagcagaagcatttataaaaataaggtatacgtggctgtggagagaaactccaggtatatacgatcataggctttttaaaattaataaactttgtttttaaaaacaaagcagtggaagttcacagcaagtttgagtagaaagtacagtttccatgtaactgctgtcctagcaaagatttttaagtacaatattttttaattaaaaagagaaaatataaaccgtgctaagccagttggtgaaaaaggcttcattatacttttagcactcttaacgcttattaaaagtttttaaaaacagatttttgtggttgaatcgcttacaatttctgatgtgtaaccttctaacatgtttcatcaaattttaaaagtaatgtaagcagtgctgtccactgctaaattttattttaatgttagaatacaatgaggtttctattttgccattagtcctgagagcttattaagtaaccagttttaatcctttaaaaaaccattctcattttgagggacacatatttcttagctttgtgcaatataagaagctaagaccatcttggcagtatcaaatgaaatgttttgcaagttagaaagttcagtaaccacttataaacataatgaacaattgttatagtcagtctaatgcagaaatacaggtgttgggggcaggggggtggtgggtgggcagacttggtccacaagtagtagtttgccaacctctgtcctaaacacaagttcaagaatatggttctcttggatagattttctgccagatgaaagtaagagtaacatccttagctaatgaactcctaatatccaaggcaacttttaattaattcaggcttttaagaaaagcttgtttaccaactcctcattaaaaatgttcagactggctggtcgtggtggctcatgtctgtaatcccggcactttgggaggctgaggcaggcagattgcttgagcctaggagttcgagaccagcctgggcaacatatctagaccctgtctctgcaaaaagtgaaataattagctgggcatgatggtgcacagctgtagtcccagctactcaggaggctgaggtgggaggattgcatgacccccggaggtcgaagctgcagtgagccattgatccaaccactacattccagccagggtgacagagtgagaccttgtctgaaaacaaacaaacaaaaagattaatgcagtacatgtccttttggtgaataagtaaatatgttttggtaactttagctttgcattataatctagtcgtcagcagattgactaagggcagataaaacaagatgatttggttttgtggtttggcacttactgtctgatttatgcccccaagaactcttgcaggccaaggtcgagtgtatctgatacctgctctggctcttctcacgaactgatttagtagctttgggccagcattagattttttaaactctttgacctatttgtacatgacaggcatttaatctttccagtagttacttgtcaaatagaaaagcatcacttcttagtttggacatttgcaaatatgactgagcagagctgacagatgaggtgggcatcttcaggccatagggtacttctggcctcctgtaacctagaaaattgggatgcctcagatatcaggtattcttccaagcagctagggttagtccctgacctcagaaaccctgagagccctcagaaaccctgagaaatccacctgggaatggtgtatttgttttggatgagattacctttactttccattctccaggtcttcttgtgttttttgtttttgttttgttttgttttgttttatatcattctatgtaaaagagaaatgtggtatcatttgcattatcatgttatttctttccttataatttatatcttaatgcttatctctggggctaggttataatctcctgagttaggtagccttaggtttcttggcggagattcctcccctgggaagtgaggtttataaaagaacccgtgatgtggccctgtggagctgcatggggtgtgtgctcagtactcactggtttcttccctgcaaagtgacacctgcagcctttggggtaccatgtctcataatttttgcattccctgcaacacacactatactgctatgggcatcattgatcattttaaagatttaaggaatgacaagatacagtgcttattctcccctatgatttgcttagatttttatctaaatagtacttattgaaataagtacttcagtatcatgctacatcttacatgtttgagctagaaacagactaaagtttaaacccttttatgagaatgaaaagttacttccttccccttcttagggcttttaatccctctttatgttgcatttcagaaaatgccctatagcgtactatgaaagaaagacattcattcctgtctttgctgctgtgtggacgatctgtattccttgctccgtgggagttgtgggtttatgtctattcttgcatgttttgcctgaaggaccacagtgacctacttggtggtctccctgctttcatggtttcactatgctgatctatccttcacttaattatagagtctatcttaaaaaaaaaaaaaaaaaaaaaaaaacttttggcctatgttgcttcttccaaaatggcatccaaaacctaagcctctttaaaattggagtccagcatgcttccccagtgctacttccttctggactccctttgccacttgctttctgcttccacccatatccagatgggctgcaaatatgccttgctggttctttactctgtctttgcacaggaggctccctcattttgaagggtcttttgctacccatccatccatccatttggattctataatagagttcttgatgtttgacagaactaggccaggaattgtgggggtataatggcaagcaagacagagtctatccttacgttatggaagttcaattcatttcccatgtggcatactacttctcaccattcagattcatctcgaatattgtttcttctttgaggtttttcccactgcacccaagatactggcctgacactttccttatctctattacagaatttaacttgttcattcattaacagatatttattgcctactatgtgcaagaatctgtgctaaaagctgggaatattgcagtaaacaaaaattaagtttacagcttacatataatgtggtaattatccatcttttaccttcattagactgagttcatgtaggactttatgtaatatctttatatcttcaataccagaaatgcctagaaataatttgcataatatacattttctttaaagatttaacaaaagtctgagggacagttttcagaataaactgaattaaactctctctctcttatgtgtgttatgtaaacatatatataaaatacacttttgggttttttgcttaggaagtagaaaaatgctaaaatttctgttacttacaagcagattaaaatgtccaagaaagaaaagtagggatttatattgattctgctcaaatgcttacctagacaatgtcaatatttatattttactcccctgttgtagtagaatggtaattggttctctagttaagcagcttttttaggattaattttgaagcaagaaattcagattaattaagggacaatttcacttgcagcatttaggcattattttaaccatcaaacttgaagtggcaagaaacggagttgcttaaggaggccagacgtaacattctaaaggtagtagggtcttgattgggttgcttaggcattaaaaggctgtttaacttgtcttgaagtctatctttccttgatgtcttctgcggtaagaacactgtgatacagatggaatgacgggaagtggttttcctttctttcagttggtgagtttgtaagtgatgcccttctcgttcctgacaagtgcaaattcttacaccaggagaggatggatgtttgcgaaactcatcttcactggcacaccgtcgccaaagaggtaccagcccataaattctttcttattgcaaagtgaagatttcctggggacgtgcttaatggcattttaggggtattttgaggcaacagctatgttgataagttatttaagaaaaaaacccagtgctactatccgtaacccagattttagtttttagagtgattttaggttcacagcaaaatcgaacagaaaatagagttcccgtgtaccccctgtccccacacatgcgcagcctccccatccatgaatatttttaaaaagtcaaaaatagggccagttgaactagattcattatgtgcctgtgccgtgtttcgcaacttaaaaatataagttgtctgtgccatgccttataacttaaaaatataatctctaatagttataactttaaagtttacccttcagattatttttatgcacctgttgttttcttttgtcatatacaattttttaataatttagccttttcccctgttatctattagtgaatacagtggtagaacagtgaagtagcttttttataccagcctgaaagctccagttagaattcagtttctcagttataccatccagttttatattcagcaggccatgcctaccatcttgatttttccacagggtgagtctgaccgagcacttggttaacctctgcttttggctaagccaataaaagatgtaagatacttagcatgaaaaggtcactgtgtggtaagaccaccttcacagctgctgtgtccccttgataggtttcctaataaatttatataggtttatttgtggcaagatcagtcttaggctaactagaattaggctcctttatctagctcatagtgcttcacttgagtcaattttgatcccctgtccctcaccggaacatgtctggagacattttttgttattacagcttgagggagtggtgttactggcatctgatagtgcccagaggccagagattctgctaaacatcctacagtcaacaggataaccacccgccacccccaagaattaggcagtccaaaacatcaatagtgctggggttgagaaatctgatctagcttagcttaaccattgtatcatagctttatagctgttagacagaaaataccactgaagatttagtattattttatgcctcttataaaatagtatatttggatccactgtagaataaaatgttttttatgtaaaaatgtgttttggaggtttaagagcttgctgagtttaagaaaacaaaccaaataatttgaagtccagctacctatttgataacctcattttttattccttctgtgttttcaaaagaaaaatcctttgtctctaagaaacggaaatgactcccataaggtcaaaatacagtctgtaatattttcattgtctacctttatgtcttgaattattcatccttcatttatcactagtggatgctctcagaactttatgctaatctagatttgtgcaaatttagcaaatcccagaaaagcaaaaagacattcaaggagaaatctctaatgactgtaagttctgattcttagtggctgcaggggataatttcttctcttcccaggattgttactctgaaagtgaaccaagagagtcagaatttctaggataaggcaggtccatgtgagataaacttccatctgtaagggaggtaggagtgagctggggatctacctggaatgcgcacaatttctggatacacgaattaagccagaaggcattaattctctggtatctgttcaccagtggagactgctacatcttatttcccaattagtttccattccagttgttcgtataaacctctattatataacatcgtggtcttattaaataaataataaacaagaataaaaagagtaccaaagtgtaacccatgctaaaaaaaatcctgttgtaaattcactcaaaaagcaaataatcttttcctttgtgaaattggttcctaatatattgggtctgcatgttgattattttatgtggagttttcttacaatgaaacacatctactctaccactcactgttttctccttacactttgtagacatgcagtgagaagagtaccaacttgcatgactacggcatgttgctgccctgcggaattgacaagttccgaggggtagagtttgtgtgttgcccactggctgaagaaagtgacaatgtggattctgctgatgcggaggaggatgactcggatgtctggtggggcggagcagacacagactatgcagatgggaggtaaggtggcctttgtgttcagcctcagagatgctgaaacatcttgtatggagtatttgtatcctgtaaattaatctttctgtttatcactgaaaaggtctctgcccactcccatcagagtctgctgttatgcaaaaatctgaactatgaatttttatggcatcctgttgaattaataatatcagtcacccatcacagagttaattttaactatttaatattaaacttgggatcaaaatcccactgataactatcataggttactggtagttctaacagggagttgaaataataatggcgttctgttttggtcattaatttaaaaatatttttaaatgctctctgggattgtcagtcattagtttaaggtgaattttcgttaaaggtttggtttgagattttgggcgttctctgtgtggatgtgtaagggtttttttttggccttttatcatttcttttccttcatagtggaagtcaaaggcattaataaatgcttgttaattttttttaactacctttgatttgttgattgtaaagaaacctattttcgcctctttttcttagggagcttagtcccgttacttcttacctgattctcattcttaactgaaggcaaacatctatattcaaatcataaaattataaaatgagaatctttgggttggaaatgccatctggttcaggcattgattttatgctgtctcatcccccgaagggtgatgattgtatcacttatcttattccttcagtattctcttagatgttccctagagctacagatttccaaacagcacattcaataggagttgtaagtttataatcggcaaactacaggatgcttgtttttttttcttttaatttctggtgtaatctgctactagggcccccatagagtttattgtctatatcagctagaacactgggaccacagtcataaactgaaggatccaggcaaactgggtcatatggttacccccaccaattacagtcttcagtgatgatgtcactatccaggttgatattcagttgaaatgctagccagctccttcctagttaccttcatttacatcccatttcagtacctgaacacagtcatgctttagactctgaaattccttagaaatagtaccataaggtttatagctttgatattcctctctgatcatgatcttccctcataatcacctccccagttcaggcttttagtccattatcctctttttccctgcctgcctttctaatcaggatggaatcaatggataaccattcttacctattccattgaacatccttgacttggctgaaacccttcacattttctaaacatatttttgtcaattctccatagctaggaaaaattaatttctttctttagttgcttctgggatttctaaagtatcaagtcatgtaaccttaccacttaattccatttcttattcatgctgtaacatcagctgggatcttaatgttactagatgcacctaattatctctgtcttgatgacctatcatcttccccatagcagttgatccagcccaacttcattctccttggttcccagcgtaactctctctcatgctctacagatgacccctccaccgtcatccattgtgaatttctgcaacatggtacctgacatttggtaggtgcccagtacgtgtttgttgaataaaccattgaattttctcctgtacttcagcaactcttgtaccttcttctatccctttgtttcctgtcttcccttttatgattatgttctgctggactctcaatcatctcctctccctttcttgcattttcagtctccctctcccccacacccccaggcttcatccaccctcctcccagataattctttcccatgtgttactatctttctactatgtgtttttaatcctgttgacagttggtaggaaatatttgatggtttattctacctgtagaaaagtccaaattctcttgcagggcattcagaagtctcttacatggcttcagcctgcattttcagccttatacatgtatgtgactctcctggcatcctaaaaccattgaccttttctttctctaggctttcattcccaccgttctgccccatctgaaatatttttcctttttttgtcaaatggggttaatgtatgataaagatatttgtcaactctaaagtgccacttcttatgacccgtcaaaatctatatatttataaatgttcacctgaaaagatgcagcctttacaagtctttacaggtgccttgctctgctatactacccttgctttacctttttcttataagaccataacttatcttccaattaattgtagtcatatctctttttatctgttagaatccaaactatagtttatgtgtctggtatgtcttgcacataggtcctcaataaatattagacaaagtaaattgtatattttaaattttttttcatagcttttggtaaggacttcatggtccacgattggatattgtagaaagcttatccagcccactgcccaggacgactttgaatgcggaccaacacaaattcataaactttcttaaaacattatgaaatttttttgcctttttttttctataggccctgttatagagcctcccatcttttagcaaagaactgtctaatacaaatgtaatgtgagccacatactttttcgttttctttttttaagatggagtctcgctctgtcacccaggctggagtgcagtggcgtgatctcggctcactgcaacctccacctcccgggttcaagcgattctcctgcctcagcctcctaagtagctgggattacagacatgtgccagcatgcccagctaatttttttttttttgtacttttagtagaggtggggtttcaccatgttggccgggctgatctcgaactcctgacctcgtcatccaccaacctcagcctcccaaagtgctgggattacaggcttgagccaccgtgcctggccttactttttcattttctaatagacagtttaaaaatagtaaaaagaaacaggtgaatttaattttaacaacattttatttaatccagtatatctgaaatatcatgtgaccaatatgaaaaatttaataagatagttcacattctttttttatgtttctttctttcgtaagaagtcttaacacttcttttaacatttaacagcacgtctcaattcatactagccacacactgtgtttgatagttacatgtggctggtgactactatatttggacagtgtagttcctggatgacttgaaatttcttatcactctttatttttccattaagacagacggtttgtataacctagtaatgttttctaaggctgagccactgaatttttattattgtttttaactattcttgtttttaaaatttaaaaaaattggtttggattcagtataattagtatatcaggtcacttgcaccattttattttttaacttcttttcctgtagccctgcaggcgggcagggcttctttcatgtggacaaaaccagaaaggtgttgcatcactgatccacacacaaggtgggctcctgccaactggcagcctccttgttccaggaaccagccctccttttgacacttgaaatgtaaaatcagaatagaagtttaacgtacctgacttaaaacatcttcaggggatgctacgtgacaattcttgaagaaggagaaacgagctaccattttcctggaaacaatatttgattcacagtattttgttgtttggtagttaatgaggcttgttttgatagaagatgagtgtttttctatcgctaatggggcatttagagaaacattccttgtaggatgagctctgttttatgacctcattgaaaaagaggtatgaaaaagaggtaaatctttaacataggcaaaacaggtagtgtttcagaaatttatgtgtaaattaccgagtatatttttctccagtgttgtaatggtcatattctcagatcacctcaaaatacctatttatgcagtctgtaatgtagcataatccagactgttactaacattatgtagcataatgttaataataataattacgtacataatgttaataatacacagactccagccatcgtgggtaagatttttttccatgggaaaattcatttggaaagctaacttgtaagactagccaggtaggcagcctagccctggaggcagagctgctcctcacctggaactgcagaatctgattgaacccagtggtccatgggggttgctgaattcgtaaagcaaatgaaatgttagaagaccctctaattgttgtagagtcacacttttcctcttgcagaggaggtactcacattttttttaagaaacaatctttaattatcgatgtattcttttaggtttaggtttgcagacactggtgagcgtgtgctgagaggtaacttgatgtatctttctggataattagatgattttttttttctatttctttgaacattttttttttaaagagctgcttaagatctggaggagtgattccttttgaccgtgtcttattttcattaagactgtataacttggaagagtttttttttttctttttctttttcttttttttttaagatgaagtttttgctcttgttgcccaggctggagtacagtggtgtgatcttggctcactgcaacctctgcctcctgggttcaaacgattctcctgactcagcttcccgagtaattgggattacaggtgttcaccaccacacccagctaatttttgtatttttagtagagacagggtttcaccatgttggccaggttagttaatgttactctctggtttggggggcagtgatatgttttggcttttttcccacccagatctcttcttgaattcccatgtgttgtggaagggactcggtgggaggcaattgaatcatgggggcaagtctttcccatgctgttcctgtgaagtgaataagtctcacgagatctgatggttttaaaaagaggggttcccctgcacaagttctctctctttgcctgctgccatacatgtaagacatgacttgctcctccttgccttccaccgtgattgtgaggcttccccagccatgtggaactgtaagtccagttaaacctctttcttctgtaaattacccagtctcaggtatgcctttatcggcaacatgcaaatgaactaatacagctcggggtggcttgtgtgggtgcgtatggccatgtatgcaggtgtgcgtgcattggaatatacaattccgtattgaacccagtttaaacttcatcagttctggtgattgctggagtgtcacatatggcaagacgtcaccttgccctctaactacaccagaaaaccaggccagcaccattgactatctagatacagtgggccgtttatattattattgtttcatatttttagattatttggtaaacaatttacagaactaagaataaaggaatagtgagaaataactattagcaattttaataagagttaacatagtaaatattttaattttacgaagaatttaaatatggtaaacccacatgtttattctgtattttcccagttttgaaggtatggatttctgaaatgagcattatcctttggaatgcagctagctgctaatcacctgccatgcacgaacctgaaatatatccgtcttacaaatactggttctacatttcaaatacatctctattaggttcatcatatttcttggtcttttttttttatacttgcaatttcatttaattattgtaaaaatttaagatatttaaaacattgacagctcataattttattgaagagagaatatagccatcttccctcaggaataaaatgttttcaagtttggatttgtaaacagctattaaaatgatcaagccagtctttttttccccctttttttctgcattatctcttctaatcaccttagagagattcctgccttgggcatttgtccacttcctaatggtatcaaataaatgtgttgcacagacataaaatgtgttgcataagcatcataaaatggcaaggaatactgtcacatcattttagcaatgatggttaatgtttttgtcacataatattgagtgatgatatccttcctgttgaatgactaagtggatgagaataccatatttcctttttattcttagaaatacattgctcagccgggcgcagtagctcacgcctgtaatcccagcactttgggaggccgaggtgggccgatcgcctgaggttgggagttcgagaccagcctgaccaacatggagaaagcccatccctactaaaaatacaaaattagctaggcgtggtggcgcatgcctgtaatcccagctactcgggaggctgaggcaggagaatcaattgaaccagggaggcagaggttgcagtgagccaagattgcaccatcacactccagcctgggcaataagagcgaaactccacctcaaaaaagaaagaaagaaagaaagaaatacattgctcacttgtcaattcttgagcttgagaaaattcatctaggatatcatgtgaaggctcatagcctaaggttttacttacgtgatcaatttcattcttcttctggtttatctaattggtaaaatgcctccttctgtcagttgttcctatttgccaatatgtggaagatgatttttgactatattcagtgagtctccagacttctttttatcatgctttttaaagagatgggacctcactctgttgcccagacttgagcgcagtggctattcactggtgtgagtatggtgcattacagctgcaaactcctgggctcaagtgatcctcatgcctcaacatcccaagtagctgggactatgcagactttttttaaaccatcttgaaagatgatgcagtactttgggaacacagcaataaaaatgtgataatttccctattgcatcacctttctaggcaattatatcattctttcatgctcatattattttgtcttctttagcacagtttttaaatagttgatggctaatgatgaaataattcttcggatgataaatattttgtaacataggaacacaatataggaaaaagatcgaggttcataccatatctcagactcatggttaagtacaagctagaatgagttttagtcgattaaatttctttttctctatgaatggataaagtgagaatatcagcccacaagtagttagaagtgctcagaactcaaaggtaaaattgtgtccaagacctgatggtattctaaaggttaacagcctatcctacttaccaagaatttacatttattatgaggcctgtacaacctgatgcaggaaaatacttggcataattttctataagttaggtagttaggtgctcaacaagtatttgagttgaatcacattggcattcacatcaaacacatacacctacgtcatcatgttaacttaaggttaatagtgtcaccaaaactaactggtctttaaaaaagaaaaactaggccaggcatggtggctcatgcctgtaatcccagcactttgggaggccgaggctggcagatctcttgatgtcaggagttcaagaccagcctggccaacatggaaaaaccccctctctactaaaaatacaaaatagccaggcatggtggcatgtgcctgtaatcccagctactggggagactgccagagaatcgcttgaacccaggaggtggaggttgcagtgagctgagatcgcaccactgcacttcagcctgggcaacagagcaagactctgtctcaaaaaaaaaagaaaagaaaagaaaagaaaaactaaggaatatcattctagacatgcagtaattaagtaaaattgcatcaggagtctaataacatagcatgatgggtcccatgtttcattatttccatgggcagaagagggatggctacattataaataaaggaaaattgtaagaataagaaaagatgaagtatgaaatatttccaactcaaaaacaaactgtatctgagcatgcagaggtacaaaatgtcacctttttcctccagtgtaatgaagggcactaaacctcttgagcatttgatatgttccagatactatattaaagtgatttttttttttaggagacaggttcttgctgtcacacatgctggagtgcagtattgcaaccatagatcagtgtaaccttgaactcctgggctcaagtgatcctcctgcctcagcctcccaaatggctaagactacaaacacattgccaccatgcctgcctaatttattttgatttatttattttttttgtagagacaggggtctcactatgttgcccagactgttttcaaactcctggcctcaagtgatcctcctgcctgggcctcccaaagtgttgagattacaggcatgagccaccacgccagaccaaggggtgaaatcttgataacaataatcaatgcagtcatcataaaacgcttgcacaggctcaatttgtaggtggcacagtgctacatctagtcaaaagcaaatttaattatggtcattgtgctctgagaacttttctcagaaaataataaccagatggtattatagatggtgcatttcacaaatacatgatttgtagttagtgaaaacttgtcattcaatcatgtaataaattatgcacatgccggtcttccacttagctagtgatgttgaaacattcatagccttacctgatgagctcaggctgtcatgagaatttatgtctattcagtactttgtctttaaaattaggtgagagagaaagagaggctgtatttgactatatatctttttatttgtatctctggagttacaagtttttgaatatataatctttcagctgcctttctgcattgcattttgagaaatgatattaaatgctcaaggaaaaaaaacctaacaactttagagggccgcaaagtgaatcatacaaaagataaattaaagctttaaatctttgccagtggatgagtcaagtaagagtggatttaatgaaatggctcatggctttgagaagcagctgtcataatgctgggttggcagcttccaggactgtgtgaggctttctgactgtctatactgaaataggagaactcatttgaaaatgacgaataggagaatagcagaaacttgcattttcttttgagggaactggctgccagttttgaggtccttatttagaaatgctcgattcctgtattgaataaacttggactacatgtatgtcaaaaagaaaagcaaaacacttttatagccttaagcagattacagatgtgtggccaaaccagtggggtctgtttttgtttccaagcaggtgatggctggaagaggagatgcctctgtagtgcagggcttgagttgctgctgtctgagctacatctggcaatgagactgtgctgcttactgagacctaatggcacaggttgccccagtaacaggatattgctgaatgagaaatactgtaggattcatttgtaagagttatttggagggttggattattcagtgctaaggatcctaagctactgatgcatggactcttttcttccctccagtatcttttaattaaactgtacaaattccctggcttaaaaatagtaggaaaagaggaagaaaatacagattcttatgattttaactggtctctggcaatagtacaccgaaacattaatttcttgttgaaaccatctggatatttgtatcttcagtgtaaaacccctaatttagataggactctccattgtgacatggaaaaataaccctttaattagttaattaattttactgtggcctcaaaatctacatattagcatatcaagccaaaaactgttggctttacttgggagccatgtggcttaaactagtaccagtaacttaccacaaggaactcagcaaaattataagtccatgtttgttttggaaggaaggcaattattacgaaaataatttagagatgttcaaactatttcctttgagtagaggtagagagtgaacaaaatctgtcccaagtgggagctaactagcttccttttttgccctccctgtttacaaagtaacacttttagtttactaggtaacatttgcagtatccccagtgtttcaatgtaaaattgtaggtggtagactaatgccacttagccaaagccatgatcacctgaatttttaatatatatttttgtatggagtgagatactgggagaacagtcttcattagcttaaactctagaatgtactgtttgtttgtttgtttgtttgtttgttttgagatagagtctcgctctgtcacccaggctgcagtgcaatggtgcaatctcagctcactgcaacctcccctcccaagttcaagtggtactcctgcctcagtctcccgaggattacaggtgcctgcttccacactcagctttttttttttttttttaatggagacggagtctcactctgttgcccaggctggagtgcagtggtgtgatttgggctcactgcaacctctgcctcccaggttcaagcgattctcctgccttagcctcccgagtcgctgggattacaggtgccaaccaccatgcctggctaatttttgtatttttagtagagacgaggtttcaccatgttggtcaggctggtctcgaattcctgacctcaagtgatccactggcctcggcctcccaaagtgctgggattacaggcataagctaccatgcccagccaagaatgtacaatatttttaaagaaatgcggtttattaccataaaatacaggttgagcatccctaatccaaaatctgaaatgccctaaaatccaaaatgttttgagcactgacatgacagcaaacgtagaaaattatgtgactttatgtgttcaatgtatacaaacttcctttctgaaacaaaaattatttaaaatgttgtataaaattgccttcaggctgtgtgtataaggtatttttgaaacataaatgaattttatgtttatacttgggtcccatctccaacatatcttatatgtatggaaatatcccaaaatttgaaaaaaatctgaaatctgaaacacttctggtcccaggcagtttggataaggattactcaatctgtaaatacagtagctcaaattgattttgtaaggcagtcaagttattatttatagtattttaatttgtattattcttttaatatagcaattcattttatatatttatataaataaattttttgcaattgagcaaattaaaaaaattaagtgcttccttcagatctacattttattttctatttgttatcaatttaataagtaaaggacacacagatcatctgattgtgttgtcagacatttgaaggtgcaactgatgaatgttcactgttgtactttgttttgtcatgtaaattgttttaaagagaagtgaatgttgagcatatagtaggccacacgtgcctgtggattggctcattgttttaggaatgtgtaattctggaaaagatttgccaagggtattcaaaagtatagtttgatattagaaattatttgaaaataatctttatagcatagcaccattttatttagatcaatagtaattcaagcagtatacataatttgctattgtaagcgtagcatataacctaagttttcttttacatttgagaccactgtttgctgttggtcgaatttggtcttccaagattttttgcttagtgacctaattgccagcctttgtgaagagctgttacttattgtcaaaccaggcagtaagggtttgcttttatctttttatcagttctttcaatgctagtagtcatgagattaatgtagttggatactaaaatgttaatacgtgttagataacaaactgggaaagagatgaatgacatcatgaaggaaagggcagtattgcacttacagtgatttcatgatgatagaactaacctgcctaaaaagacattgggtggaaacagaaaccaggtgtaatagacgcatccaagtagtcaaggaaagaaaagacttgtaagtaaataagataatctttgcttcaaaaatatcttcaaaggtttaaaatgtgctttaccctcatatataatctttttgagcctatttctttacctcaaacatggggaaaattgcaataatctgtatcacggtatttgcttccaaaacgactaattggtgtaaatgcatatcaagccggtaaagtttacagtggacttgtttaaaatgcgtagattggaattgttgggggagcaggccagcagcatgggatgttttttttgtttgtttgtttgtttaagactctgtcgcccagactggagtgcagtggcacaatctcggctcactgcaacctccgtctcctgagttcaagcaattctcctacctcagcctcccaagtagctgggattacgggtgcctgccaccacgcccagctagtttttacatttttagtagagacagggtatcaccacgttggccagactggtctcgaactcctgacctcaggtgatccgcctgcctcgggctcccaaagtgctgggattacaggcgtgagacaccgcgccagctggggtgatttttttcttagtcaaatcacttctctacccatcatctcacactgtcgaatacaaagactctccttggggctcaatgactcatctcccacctctggtttgataatcatggctattataacatgttccctttttaattagttattttaaaattattgtaggtcttgtaatcataatcaataataatacgtaatggctccttaagcacttctatcctagataaggttgagaacattattaaaattagttttggtagtaatcaagtaatgataattcttatttatgaatttaaatatgtaggagtttttttattttagggaagcaaaaaggactagaaagtatgatgtctcatgattagaaaactgctataaaaatgaaggtagaattgatttgggctgttttggacattttaaatagaaatttaaataggtattcaaatagcaaagtcattctactttaaaacttctatacttttttaggatcttcaattttatatttaaattatatttttgaaatggttttagaagaaatattgtatcttaaactctaactactaataagtaagagaagatatatcaaaggtttgatcttttatctcctagaatatactattcattcgtttcccattgtacgtcatttgaatgttaatggttagcctcaaatggttttcaacataattgtatagctactattattggaaaattggagccaaggactcatacacatatcagaagtggtaatgaagcactttggttttatgaaaatatgtttacaaggtagtcacaggatagcaatattgcatttactgtaatacaatgatggtggaactaagtgcagtggaacaggatgctgagaccacagttaccgcatctctaagtgcctcgtctagttatggtccaacctcagatataactcattggtgttgaaacacacctagcaacattttaagcatagaccgttcattaaaaggtacctttttaaaaatttttatttttaaaaattgacatgtaataattgtacacatttacagggtacacagtgatcagatcagactgatcagcatattcatctcaggcatgtatcatttctttgtgttgggaaaattcaatatcctgcttctagctgtttgagattatgtcatatattactgttaactgtagtcatcctacagtgctgtagagcactagaacttattcctcttatctagctgtaatttggtatcctttaacaaatctttctctatcctcagtttctacctacccttcccagcctccatcatcctctgttctactctttacgtctatgaaatcaacattttctagcttctgcatatgagagcatgtggtgtttaactttctgtttttggcttatttcacttaacatatgtcctccagttccatccatgttgcttcaaatgacaggattttattcttttgtatggcttaatagtatttcattatacgtgcatgcacgcacggacacacacacatacacacacacacacacatcacattttcttcatccattagtctctttggacatctaggttattccatatcttggctattgtgagtagtgctgcagtaaatatgggagtgcagatacctcttttaatatactgatttctcttcctttagataaatgcccagtagtgggattgctggatcgtatggtagctctatttttagttttttgaggaatctccatactatcctcaaatggttgtactagaacagagcttttttaccttccttccatttgggaatcttcttacccaacatgtatattagtaacttggctatgtatgttccattctctgtctcaaatactgtgtctaggacatctgcaatctttggctatgaccacgactgtaaagtgcatgacgcttttgctctgtcatcagtattagttgacaggcaagtaagatagtacttctcttcataacccctttacctgcccagcagaataccagtacagacagacccagaatatctctgggctcaagaatccagacatttataggatgggacttttatctataaatcaccttaagattagtaagttcttagaattggttacctttgccatttctcagaagccctttgtctagtaacctgtgtgtcactgtcatttccagcctgtctttcctacacattgtttatgcaggctttaggagtgcccaccccccagttctaccccccacccccaccctagcctttgtggttttaattatcctgtcttggctgattttgttttgttttgacatttcatccattaaattcctgacactggctatctctttacaattattatactatttttctttctggctcgctcttcctgattgctgtaatccatgcccttgactttaaataccatttgtaagtagactaggccaaggtttatttctctaggccagactctacctagttatttcataggcatatgaatcctaacatgtccaaatgagagttcttaattcccctgctacccagtcctcaatgtggttctctcaaagctattctatctcagtaatggtcctatgccctctcctagggattattgctgagaacctagaactcatcatcgtctcttctgcacatcctatgaattctggatttatccacttatctccatcttttccagcactaatctaaactcccattgtttcttgctggagttatttccgtatcctgctaatctctgctctcgttctctctccctgacacatgcgctgctttcttctcccacaccaagccattctctgtacagcagccaggatgtagagtgtttatttacataaagcagatcctggaacccccaaatttaagttgtgttcgtggcttaccaatacgcttaaaaaccaagtgcacagagagaaaacaatgaagccttatttggatatgctgaggataattgataacgggtaacaactaacaaacacgtagttggtgtcaggtttgacctcctacattccttacaggtattagtgtatttgacccagctcctccctacctccgcagtatcaccccatgcctctctttcccccgactctcccctgctcagtgtcacacaagtcaatatccccagcttgctaacccccgggctgacagatctcattgtctataatggatgttccaaggtcccaccttcagcctcagttttgttgccatctttccagaatgaattcccttgatcattctgttttttggagacaaggtcctgctctgtcacctaggctggagtgcagtggcatgatcatggctcactgtagccttgacctccctggctctggagatcctcctgagtagctgggactacaggctgcacctggctaatttttttttaatttttagtggagacaagatctcactttgttgcccaggcttgtctcaaactcctgaactcaagcagtcctcccacctccgtctcccagagtgctagaattacaggcatgagccaccatgcctggccctgatcattcttttctgaagaaaacaccccttcttcattattctcaatcctagcagcctatttacttccattctgaaatgaatcacattttagtattttattggttcgttgtcgttctctccccccatagaatgtaatctctctgagtacagggagcttatctttttcccttttggagcctcggatccagcagaatgccagacacttagcagccactagcatttgatgagtgaatggcttttcatacacaattttagacattgttcctgattggtctctctagtcaataatagatttatcaaatctaatcgataatagatttctttttcttttctttttttctttttctttttctttttttttttgagaagtcttgctctgtcgcccaggctggagtgcagtggcatgatcttggctcactgcaggctctgcctcccaggttcacgccattctcctgcctcagcctcccaagtaactgggactataggcgcccgccaccatgcccagctattttttgtgttttagtagagatggggtttcactgtgttagccaggatggtctcgatctcctgtcctcaagatccgcccgcctcagcctcccagagtgctgggattacaggcctgagccaccgtgcctggccgatagtagatttcttttattgattagagagactaatcagcaacaatgttttaaaattctcacatagatctctgaatgggaaagcagtcttgaattatgcttgcagggagagagaggggaaggaaggaggaggaatggtataattagacttcataaggctagattttgtttctacttaaataatggtatcacagtgggacatattatccatgcagaaagtgagtgggcatctggtctattatctgtggtctttcaggaatggcagctctttagtttaaaaaacaacaaagtgcagcactgtttatttaatggaaatagaaaagcagtgcctgtgtattagtggctcagatttttttgttctttgttttcagctgtctgctgtatgcctctccagcggggtcttacagaatctcaagtctaccatgatcaaagctgaacccattagctccatttcttaattcctcctgtatcctctgttaccattagtaactattctccaactcaaagcatcagattcctcctcttactcactcccttcatccccagtcaccagttctgtgctgttattttatccaagttctcagtaggcttcacgagcaccgccttcacatcccaactgtcgctcctccacctatctgtcctccatgcttctgctagctcatgtttgttgcaatacaactaaccttgccactcttctgcttcaggcttttctactaggctctgcatctagatgatggtccagactcctcagcctgtgaaacaaagcccttcataaaagagcagagctacagctagtcagctcccttcctgcagtccaccccctcctccaccatactgagaattggcaattcctgtagcactctttgtatgagtccattttcacactgctataaagatataaccaagactgggtagtttataaaggaaagaggtttaattgactcacagttctgcatggctgaggaggcctcaggaaacttacaatcatggcagaaggggaagcaaacacatccttcttcataaggcggcaggaaagagaagagcgaggagcagagtgggaacagccccttataaaactgtcagatctcctgagaactccctcactgtcacgagaacagcatggggaaaccactcccatgatccaattccgtcccaccaggtctttctctagacacatggggattatgaggattacaattcaagatgagatttgagtgaggacacagccaaaccatatcactcttcatctgctacgggtgccattccctgtttctacagtgtcctgtttgctaccttctttgtagatttctattcattcatcatgtcccagtttacctgttacctcttcaacagattattcttcagtctgtccctcccaaactccaccaatgaacattctttgttcagcccattattgttaatatgcacttcactgaaaacactgttttatgcttgtttacatcccatctctgcagggctctgagcctatagtcagcagttgggaacttactaggcatagcgcccagtaaaggatagctctttatatatatatatatattttttttttttctaaaataataagccccaagaaaaacattacctgtgaaaaacaaatgatatttttataccattttcaaaacctaatagcaataaaaagaaaagaaatgtcataagtatacatttaagctgtagttaaaaacagtaaataggcacagtatttaactcttatcatgtgctgttccaagtgtgttatttacatcattggctgttcacaccatcccctgaggtggttaatatttccatcccatgttaaagatgaggaaaccaagtcacagcagcctaagtgacatgttcatagtcacattggagctggcaggtggcagcactgagaatgaaacccacgtggctgagctctggaaagtcaccattaatcaccacactagaccttctctctaggatctacataactagaacatacaattaactggagtatatgtaagtgtagtcgttccttgagaaaggaaaagaattcacaaatttcatagcctcatcccttgtgcatttgtggcattgtgctaggggtgtctatttgatatttgaccctacagatttctcagatgccaaccaaccacagatactttaaaaaaagatacttaatacttaccaatgcaagaaagtgggcttgttggaagaggaaaaatgttagctcactaatggaaaatcaactaaaagtcttacctctccagaacatgcttttcctaaatgttgtggctaacccaagaagctacatcatctttacctttatgatacaatttaaagtacttttctacttacttcaagccctcagagcacagaggcaagggaggccttgggctataaaccctgtagcctgagccacatggcttcttctcctggacagatacctggcatattctgccactgaggatcagtggtgcagatgtatctgttttctcctaggaatggggctccacttacgaatctggggcaggacaaggtattgctgcattttggggagcgtgctggaaggaggagcagagtttgttgtttttgcttcctgatatggactggctgtgtctccattcaaatatcaacttcaattatatctcccagaattcccacatgttgtggagggacccaggggaggtaattgattcatgggggctgatcttctctgtactattcttgcgataatgaataagtctcacaagatctcatgggtttatcaggggtttctgcttttgcttcttcctcatttttctcttgccttttcctcatttttctcttgccgccaccatgtaagaaatgcctttcacctcccgccatgattctgaggcctccccagccatgtggaactgtaagtcccattaaacctctttttctccccaatcttgggtatgtctttatcagcagcatgaaaacagactgatacacttccttaacagaaccaattattttttcccaaaaaagagggggagaagcccagaagcatgcagcttctctcttctttctaaggaataggtcttcacaaagtgcccccaaaagaaaaggaccaggcttttctcttactttgtgactttcctaggttgctttgtagccattttggacacagaccacctatagctgtgtagtagttctcatgtgtatggacacagtggaaggagatgccaggcacatagttcttgctgcattgacaccttttcagggcatcttcttttaccatcttctgtagaaactgcaacagcccggccaactaccagccccagcccacccctagctttgctgctttcattttctctgtaacacttgtcaccttgtaatgtgctagtgtaacatcgttgttttagttttcttatatctttccttccctgtagaatgtaaataccaggaaggcagggaattttgtctgctttattctctgcagcatccctagactccagagcagaccctggaactcaaatatttgttagacagccaaaggtcatatacttccaactctccacccaaaatatatatggatcacccatccttagtagcagctaaacctttggacatgaggaatttgctcgttcacagttttctggcctagcatctgattaaccaaactttttcacatatcaagaatttaaaatgactccaaaactttttatgaccttaggtgcttctccttaattctagttggttcataaagctgtcagaacaataatctgcttttgataatatatgacttttcttgcctccaagatagcctttaaaaaagcaatttagccttttactgtaattatattccaaatttaagtcttgccagaatatcattttccccctttaaacatactttttatgatgccaagatattttaaagaaaagttcagataggaagcatatttaagatgtcagtatatgtctctaaaatctaagaacatttttctacagagtccagatgataccatctcacccacaaaattaacataaatttttagtaccattggataccatgtccatattcagattctccctgagttccagaaaggtccttcacaggttatgcatttcacatcctatccggcaccagggccagcatcttacatccttaattcttaggattcagaatagcactttttatatcctgacactgacttgctgaagaagctgtaccagttttcctataaactgtccactccttggatttgtcttatatcatgtcccaggggtattgtttagattgttgctctattgctaggatattcatgttaccctaagtgtgtactgagatagcagagtaaagagagattgtcttttaaaggttctgcccaggaactgctggtttacacaaaagctgggctttagtgcttctcggatctctttgcttgtttcagtaatttttttttagaaattcactaattcactaacgtaagtggggcagggtttacaggagcatgtgttgagagaagttggtttgactttaaatggtcatttttacaatccgtatttaggccttacaggtcgcatacaatctctgtcacatattgctgtcatttttaccccctttcttttctttttataatcctttaaaaaatgcaaagcccacccttagctcacaggatgtacaagaacaagttgcgggttgcagtttgccaagacctgctctgtgccactgctgacttgccattcttggagcccactttctgttcttgtcagccaattccctttcaggtgctcaggtttccctccctcctgtcaccgggcctttgcacatgctctacccaccctgcctagtggagagctatctttggcccctggacttcattcacttcggaccttctttgggtcacatttcagtcatgcctcactagacacctggaatctctgcctcactagacacactagcactcactcttttgggtcttctggctgtatgtaattgttatcagggcagtaattttgcatttatacaggtgctgaggtcagtgtctggcctttggctacttgccttgtgagccacctttgctttccagtgtacccctagctcctggcccagtgtccagcttcccagcatccattcatgttttccctggagaccattctgtgcccagcagccagagacatcattgcaacttaaatctcattgagtcgttccagttgctgtaagaaatgtaaccgtactgggtaacactatgcctgtctgtctccaccaccagatcttatacttcctccctcatctgctactccctaagctcactggccctttgttgtttttgctgaacgtgctaatctcttcctcacacctgggcctttgcacttgctcttacccctgcctcagccatccatgcactctcttggttttgccgtgcccgacttcagcatttttagttcacatggctcttccgtggggcccttccctgaccaccctgtttgaaatgctacccatccctggcacacatctatcatagtcattcattagcaattagccccatctcctttccctatagtacttttccataattttttttcttgctcatattacacctccccaactaatagatagattccaagaaattgagtgctttatcttcactacctggaatagtactggcacttggtaaagcacagcgaatattgttgattgaattactaggggttggcttagagaggtacttaatggaatgattcaatggatgaatgaatgaatgcattgccacttttttgctcattatcatcaatttgtacatatgcctttcaactcaaatatttatccattggctaaagaaaaaaaatacctgaatccccgtgtctctgcagtttacccttcctcactgttaaaactcagtgcctgtgtaaaatttcattatattttatttacttcttattccacttgtgcattatgtggatattcctgcctcatccccacagccacctatcacttccggccaactcagatgcctctggtcgcaacaatcacttctctgttgaatttctgaagcgtttaatctgcagtatgtctgttactcatacagcagttagtgtgaattgtctcactcagaataagtattcattaaatgtgtaagaatgatgatatagcctaatttcagatcaagattgtgatttatagctcattcttaatcagctgtgtcatgactttatttatttattccttttttttttttttttgagacagagtctcactctgtcacccaggctggagtgcaatgcagcttctgcctcctgagttcaagtgattctcatgcctcagcctcccaagtagctgggattacaggcgtgcacccccacgtccagctaattttttgtatttttagtagagacggaatttcactatgttggccaggctggtctcgaactcctggccccaagtgatctgcctgcctcggccccgcaacgtgctgggattacaggcatgagccacctcctcaggcctgagtcatgaatttttggtagtccagtcatgtggttatcttcctaaagctggaggccttaaacctagggccccaggtgggcttatgcctttagctgcaagtaacaagaaacccttttcaacctttttactgatttatttagagagaagtacacataagaggtaatgcaagtaagcaaagttttttaagaccacacaactagatagccagcatccggaccagaacacagagacttgctggcccctagaatcctctctcctggcccctgccagttactggcctttcccctgagttctatttgcctgcagtttgcttgttttcatatttaattcaaatagaattaggtgatgtgtccccttgtgtttcgcttctaacagtgcctttatgcgggagaagtactggctatttcttactttgccctccctccccggaaacattttcctaatttagtagcagtaatttcaaaaactgctttcctttcggacaaactgacttatccagccattgtaccttccagtttagactctggcagtttggagagttgagacagagagaaggagaaccgtctgtttatcttcttgaaaaaaactactgtattttctctctcttctgactctgggagcctctagactcttttttcccattttcatatccacagaggaagagtctgaacctcttcctgctgagctttcccctggttggttgcatttcaggaactgacattggttgtcttccctcttccctcatcagtgcaagtaggttggatctcatgatagtccatattcacataaccatgagaatcagagctttctctctgtcatttcctccctgtttatctgtagcaagaagaaaaaagtccgtcttaacagagactgtgaaagaataaatatagactttattgttttagagcagttttaggttcacagcaaaattaggcagaaggtactgagattctcccatatactccctgttcatacacttgcacagcctctcccattatcagcgtcccccttagagcgatttgttacaatcagtgaacctacactgacaccattattatcacccaaagtccatagtttacattagcattctctcagcattgtttattctgtgagtttggaaaactgtctaatgacatgtacccaccattgtagtgtcatactgagtacttttactatcccccaaatcctctgtgttcctcctgttcgaccctctcttgcctttaacctttccaagccactgatctgttactgtctataattttgccatttctagaatgtcatatggctttcttagaaaatacaaatggtgacttttttggcatgactttaataaacagaaatgaaaattggtgtgtgaatcaaaatctttcactctgtaaagggacttatcaggcggcacctgcatgtggaattatatcaaggtcagctttagttagaaacagaaggagagtcacctttgtgatgtcatttctccttcatccaagtaaaatctcgcatgctgacacataaaattttatcatcagtgatttatttcctcgtaggaatgtccctttgaccttattaaattcagatactctggggatggtcagcattttcagatggttcccttgttctgtaaaaatgtttgttattggtgtttaaaagctgtaaaagccacccactataaattgatagccactaaagtctgcgaatgtggtatgaatgttccactatgttgccaagcgtttattttattgtgagttgttatttgattgtttgtaaggaaattgttttatgatgctcagctttatatttccataaactgttcctcccttgcaactccttaaactgtgatgagcttttcaaaacaagtccacaggacaacagtctgtccagcatttgaagaagtggtggaaaagtcatttttttcctttcagtgtttctagctgttcatgaaaactgcagttaaaagttgtaatgttgttgtgtttggcattctttgggaagatgcagcattattcaaacaaaaccgtgtgctcttgttttaaatagtgtccaaatgaataattgaattcatggacatctaaatttaattccagaaatcaaagctatggtaataagaacttggacctgagttctcttaggccaagtaatttaattccttagccggttgaactatttattacgtgtctccgttcctggttattatgccagtaaattgctcaggcagatgcagggatggatgatgggcatataattcactctttttcacggctagacacataccagaatgcagatcacactaaacagctgtttttacaaacatggtttctattcagagctttaagggccacatccaagtaataacaaagaagcctggagaaggaacctggggatacccagggtcatgttttcaccatcccacctggaaacacggtgctgtccaaaccctggatggtacacttggacatcgtcattccagtcatggttcaagatcacgtgtatacatcatgatttaaagagaatactggtttgatttttcttcctgactttccctgaattttccacttaaattggaaaacagcgctagttagtgcccatgatttgattgaataagtaagagatctcaaacacggtaaattaactgatgacatgcatcaggtcatctttctttgattcaccagtaatacaacagtgagatcctacagaaaaatgcaaaggcagaagctcagggcagctgagcaactgttaaggattcttttgaaatgtagccccacgtagtaaactttcgtgcaataatttgggcagtcaaaaaaaaaagtcagttatttcacctcatttatttctacgaggagataaaggcttccaacatctgattttcagtgccagtgttttctgtttctcttttcacctatttcgtcctagtcttgtggaaatgttacaataactgattaggattttctctgtattaacacttcatttattaacatatgagtaagttgctattaataaattattctgcttaatcagtttctttttattctttagccacatgctaaacttcttcggatgtcttcacttaatatccttacatcatatttaatcagagttagaaaggcgttccacttgggggtcatacacatttttttgaaacttttataaacgccctttatactattcttgtatcctacgtaatcagagtcaggtgttccatggggatcatacacatctttatacaacttgtgtaacacatgctttaaatcctgaggtaatcagagaattcctgccattgatggattaatctctttacatatctttccctttcactctcagcaaaactacttatggcggtcctgttagactttgaaagcctttcaggtttatggaggagtcttcctttctattgtcgtagatcatggaatcatagtgttcgcttgtctcacgtgtttggaatctgatttcctacataatgctgtgctctcactacgagtccaaggcttcctgtggctacaaatcccgggttcctatcacttttcccaatgatgagcttctccttgttggccagaatcagctctgtggtaataattcccttctgctttctccctctcgcttttttttttccttctgggtacattataatgtcagcatagcagcttttaattctattactatggtacttctcgaatagacctgtggtagttgccccagaaaggttgaaaccccctgccacatctaggtctttctcctgtattggttttgtgatctgatcaaggacatctattcctctagtcctgctaggtggtatacgataggcttttactattagatattcaaatgctgtcaaccatgcctgccttgacaggtacatgatttccacaaggatttcctaataggcctttttaattttgttctagacatgcccttcttttgccatccaaatttgcttattttttacaaactatgatgcatcagcatgtaaatgtttaataccataaatatttctgatcctcttcccaatttcactgagttactggttatctcttgccattattctcagcatattgcagtggatctcagaatattttcccctgaccaccagcatcagtattacctgggaatttgaaatgcacattctcaggccccaccaaggcctcatgattcagaaactctggagctgcattagaaactgccacaggcacctggtgatctgtgttggtttttgtttgtttttaaggagacagtgtctttgtctccctggctggaatgcagtgatgcagtcatagctcacagcagcctcgaactcctgggctcaagcaatcctcccgccccagccttctgagtagctggaactacaggtgcacaccaccatgcctggctggtttttgtttgtttttaaggaggcagtgtctttgtctccctagctggaatgcagtgatgcagtcatagctcacagcagcctcgaactcctgggctcaagcaatcctcccgccccagccttctgagtagctggaactacaggtgcacaccaccatgcctggcttttttttttttttttttttaatttttttggagacagggtctcaccgtgtggcccaggctggtctcaaactcctggcctctaggttttttcccacctcagccttccacagtgctgggattacaggcatgagccaccacatttagcaggtaggtgatctgtgtttcaataagccttccaggtgattctgatgctcactgaaatttgagaaccactgaaatatttggttttctacaaaacataagcagttagtaaccatagggtacgcaactaaatagttccagcaggcatccctgaccacagggcattgcagatttacttaagtcagtttcatcttccacctgtgtgagttccagcaggcatccctgaccacagggcattgcaggtttacttaagtcagtttcatcttccacctgtgtgagttccagcaggcatccctgaccacagggcattgcaggtttacttaagtcagtttcatcttccacctgtgtgagttccagcaggcatccctgaccacagggcattgcaggtttacttaagtcagcttcatcttccacctgtgtgtccagtttaagctctcagttgcagtttttaaaccaatttccaccagcatatactgagtatccgctaccgtgcaatgcgttgcggctcttgtatgtgcactatgagaagtaattcccataatacggcaaactcagttttgatatccaccaccccactttttataatggactacatttttcagagcagttttaggtttacaaagaattcaagcagaaactacaaaaagttccctctacctctcacttccccactccccaacagtttcccctggattaacattttgccttagtatggtacgtttgaaccaatatcgatacactattattaaccagtattcctgttttaacatgagaggcgactttttgtgtagtatagtctcttggttttgacaaatgcttaatgctgtgtatctattattacttatgacagtatcgtgcagagtagtttctaaaaatcctctctactccacctattcatcccttccccactccccctgaaccactggcaaccgctgatctttttattgtctccgtaattttcccttttccagaatgtcctgtggttagactcatggcatccccttttagcaactgcagaaactaagaactgtccccaaggataaaaatttttgcagacccactgagctgggatttatacttagacctgctgaattgaagttttgggtgtgtttcttctcaaattgccaaaattccatatggacgacttttcttttccttccctgaaatgtgtttaattgactttttctgttatttgtgtttgccttcacagtgaagacaaagtagtagaagtagcagaggaggaagaagtggctgaggtggaagaagaagaagccgatgatgacgaggacgatgaggatggtgatgaggtagaggaagaggctgaggaaccctacgaagaagccacagagagaaccaccagcattgccaccaccaccaccaccaccacagagtctgtggaagaggtggttcgaggtaatccaccatttgcttggattccccccacccccaaggaaaagaaagcgtaataccagagttggaaatatccaccctagcaccactgccttccccaatcaaaaacatgtttttttttccaaaaggcttcttatgcttgtgaaatttttttggtttaacaagcaaacaatttcaaataatgtgaaatctttattatacagtttgttttgtaccttgtatatgctgcttggcaaatcccaagttaattctacaagactccgcccaaccaggtagtcatctaatttgacaaacactgagttaggtgactccttggtattcctttggcagtgagtgtttgttatataatattgtctgttaccacctagacgatgagctccttgagggtaaggacttgattttattcagtattgcacagagtgcctggcttgtagtttcgataaatcttagttgagtgagtagttgtgattagatttcattaaagaaggagatttgggccaggcacagtgcctcacacctgtaatcccagcactttgggaggccgaggcaggcggatcacctgaggccaggagttcaagaccagtctggccaacatggtgaaaacccatctctactaaaaatacaaaaatgagccaggcgtggtggcacgcacctgtaatcccagctatttgggaggctgagacaggagaattgcttgaacccaggaggcggaggttgcagtgagctgagatcacaccattgcactccagcctgggtgacagagcaagattgtctcaaaaaaaaaaaaaaaaaaaaagatttggtgagtatcgcattattttatgctatgaattttaacagaggtgatttatgttgagtttacattgttttattgggaagtacggcagtgctttcttcaagaagtaaatatagtattaatgtcttagactttctctattgaattaatgtttgtgttgcaaatattgtgaactaaaagaactaaaggtcatacttgtctccatgaaataaaaacaaacattcagttgatattaaatgaccaaatgttacagaaacgagtaaactgttggattgagttccttaaagagtatgcatttgttccttaaagagttctgcatttcatatctgccatctgcttggcagatagtaaaagatgcttctagagctagattgaatgaatatgtacttgactgaattttaatgtactgcaaatacttataaaggtcaaccacaaatgttacagcatttacaaaaagtggctttctctcactttttgctaaagtttaatgatttcagatttattgttctattagagcttaacatgggctattttgtctccctcaactatattcatagttgtcactatagtattttcttccctttgttgcattttttaccttattaaggtgtaatttacatataagtttcatttgcttttaagtatataattcagcggctttaagaaatttgccaagctgtgcaactatcaccataatctaatcttagaacattttcgtcactccagtaagatcacacatactcactcccagttaagccctctactcacctctagccccaagcaacaactaatctactttctgtctctatagatttgcccttttttggactgttattataagtgggatcatataatacatggtcttttgtgtccgacttctttcacttaacacagtatttttgaggttctacatttctttaacttgagcttttaaaattgagattattctgaattaaacactcagcgttagcttaaaatttattgaaagttttacatgttctttgaaaaaaaagaacagagtgcaagatggattaagtttatcattccctacttaatgacagtttcttactcactttagcacataagtaaatgtgctagtaaatgcgcattttgtttaaaccaccatttttcaaatactgagacatgctttctcagggtgtttttcatacaactgttaggaccaactatggcagatctggtcaaatgaacttgttagcctgatgcctgtagcagggaaggacagcttttcagggcttctcttctcgaaacctaaatgaagtgtgaatacaaattacagcagctagcagcctgcagtgggactgaaagtccttggtgaatctccatcaagctgggctgtttaatagaaccagtttagtgtcccattttacttgaaacattagattttgagcacctgcttggtacaagccattttgctaggccatgtggaatggatgatgagcacacacagaccagctaaccctagtggatgttaaaatctcttaggaaatagaagtcaaagaagtacaaagccatctgtgttgtaagaaatgtgaacacagaacctgcctccgagagtaagagggaacttctggattgatcagagaaggttccatggagagcatgacatttgaactagagccaaaagtgtgggtgggtggtgtgtctaccagtggattttgctgtagagtcatcaggactagcaaaacaaatgtggtgccatggaaaggcatatttaggagacaggattggtccaatttaagctagagcagatgtcttttaggttgggaccaaaatatagagaccttcaatgccaggctggcaaagatgggcattaactgcaggtgattaattaacaaatattaattcagaagctactgtgcgctgcagatttttccaggagacaataaagagattttgttttgatgctagtactgttgaggtaacaggtgaacaaggagtgacatcagttatgcagtacaatgagaggatgccacataaacttaggcccatattctagaacaagacaatttgcttgagataaattggtctcattatcgtctgcattagtccagttctttttgcttgagttttgcaggtagtattatttgatattaagacggaacacagagatgttgtattgttttatttcctgtagaaagacgaaggcagttaaaagaatttcataaacaaaacactccaggctaaaggcaaaaaagaaatgaaccttaaaaaataacaagttaataattttgttggcaagaagagcaacaaaagcaaccttctgaaagcaagatacctggtcattgagagatagcaactgttaatgccccagaaatagaggaatctttaatgcaggtccattcattccacctcaaactcctgaacaaaagctctaattgaggcaagtcttcctgggaaagggggcctaacagaaacatgttatggtcagttgtgcccatgcgagataatttttttgtgcttgtagctaattccagtaaagaagtagatgttttagagggtaacgttaaaggggtcagctgcaaagagtccttttcctcctcctcactgttacaaaaggtgacttgtggttcttccctaattgagagcaatggcaacgccataggtgattactcattttgtaaaactctaattacaagtaggttgcttctgtgttcaacataaaaattagaagtgacttgcaaagatgagatactgcagggaggcttacaatcttgttttcagtgttagtgtttcagtacctggaacaaaatgtgatttacagccatcctttctaagaaaattgtcatcattaccaacatattgctactgataccagtccttaatgtgcttcataaaaaactcaataatttcataacccgttaaaaccggaaagaaatggagggaagaaaaataagacacttttagcgtagtcataatcttctctgccatattgtgttagaatcgatgatacccaaatgagaagatgtctgttctctgtcactgattccagtagaataaaattattgtttaaaagtaagcacattcgctgcactccagcctgggcaacagagtgggaccctgtctcaaaaaaataaaaataaaagtgagcacacgattgcaagatctatctggttttgggggcttattgtcatctttggttgttaaaaaaatacttggatattattggttattggtctagtggaataagccattaccgatttgagtacaacagtggtgtatttagatacttgctcctaattttctgttcttcaagaagggattgtacttcagaaaccagagatatcagggtagttttgattgagccataaattctaaattctgattgaaatgggtattgtaataaatggcataatcttttatttaatctagccaattgtgccctgtccagaggaactggacatttcttccttatgttccatttattcagcaactattcgttgtacccctgctgatggctaggctctttgctactgtggaaggcatcgttggggcagagcagacagcattttacctcctgggagactggcagatttttgaagcctttgttgcagatatagattttcacggtcaccactcttgccctttaatgtaatttaaatttttttttttttttttttgacacgggattttgctatgtttcctaggctggattcaaactcctgagttcaaacctcagcctcccaagtagccgggaaaacaggcctcttgtgctttaaagcagtgattctctgtctttaaaccttgtaactatgctgtgtggtggaaattttacttccccgtttaaagccaagatctctaaggccaagaattttttttttttttttttttgagatacagtctcgctctgtcacccaggctggagtgtagtggtgcgatcttggctcactgcaagctcggcctcccgggttcacaccattctcccgcttcagcctcccgagtagctgggactacaggtgcctgccacgatgcccggctaatttttttgtatttttagtagagtcagggtttcaccatgttagccaggatggtctcgatttcctgacctcatgatctgcccaccttggcggcaccccccgccccccgccccccgccccccacaaagtgctgggaatacaggccaccatgcgtggccgaaaaaaatttttttaattggcctgggctgggcgcaatggctcatgcctataatcccagcaccttgggaggccgaggcaggcggataacgaggtcaggagattaaggccatcctggctaacacggtgaaaccccatctgtactaaagatacaaaaattagccaggtgtggtggcatgcgcctgtaatcctagctacacaggaggctgaggcaggagaatcgcttgaacctaggaggcggaggttgcagtgagctgagattgtgccactgcactccagcctgggcaacagagcgaaacttcgtctcaaaaaaagaataaaataaattgtcctgggtcacataactggttaagtgatgaaatcagaatttggacctagataggccaggatatttctgctacactcatgtcaaaattacactttttattttctttataaatacacacaaattcatttcaacctgtgttcccttgtaaatgcatatacctttgatataggcatatattcatctattattttacactgtgcatttctgaatttttagaatttttacttgaagtgatcaggctggcgctgtggctcacgcctgtaatcccagcactttgggaggctgaggtgagcagatcacctgaggtcaggagttagagaccagcctggccaacatggtgaaaccccgtcttcactaaaaatacaaaaaaattagctaggcatggtggcgcgtgcccataatcccagctactcaggtggccaaggcaggggaattgcttggacctgggatgcggaggttgcagtgagctgagattgcgccactgcactccagcctggcgacaagagcgagactccgtctcaaaaaaaaaaaatagaaaaatgatcgggggtccacaaataagagtaatgatcaagggtcagcaaattggggccaaaaatagcctgttttcctgttttctacacaaaagttttattaggcacagcccatcccatttgtttaaaaattgtctatggatgttttcatgttttggaagtagagttgaggatcgcaaaagagattgttttgcctgcaaaactgaaaacatttactatctggccttttcagtaaaccatttgctaacccctgattctcactataagacggtgactgtgaagttctttctatttcacatactgccatatcaagttgatttcttttgaggtagggtttgtttttttttggttagagatagactagtatagtgtttgagagaatttttatgaccttgggccagttaagtaacctgttttttatgtgtgtagtgtagatggtaatgttatcttgcatgtttcttgtaagaatgactttaggtaacttatgttaaacgcttaccatcatgcccagtaagtgttcaatttacaaactcaagctgtccagattcaaatctttgccttacaagctactaactgtgtaaatttgtataaatcaaataaccttgaatcctcattgcttctttttgtaaaatagggattaataagacctatccaatatttaactattttgtgaggattaaattaattaatttataggaaacactttgcataattcctggtatacagtaactgctcaattaaccttagttgctctcttagttatggttatatcatcattccgatcctccattgcatttgaaacattagcaaactaatgtttactactaatgaggaatgttaaaggtaaaccaataagttgacttttaattataaaaggcataaatgtaacctatccatatctattggtataataaagctgatatttagagagaacattatgttatgattaaaagaaacatttcttgcttaaattttttttgtgtgaatatacactgtatattgaaatatctgcacttaaattttaaatccagctgaaaattggataagatagtattagatgccactgcatttcaagatagagttttatttcttgcaggtattttaagccttgtgggagttcttctgttaagtgaacagatagagacactgatacagatggctctttcaccgtctcatgtgatgataaaagctaaaaggtttgatccgaatattgcttatattgggctaagtgattgaccttggcagaattaaattatttttcttcttctggtgacaattaatctgggagaagtaccatttgatttattgctatacatttcaccaatatccacaaggcacttgtaggtaccagacatggcattggttgctgggggcacagagataggaacaaagtggcttgctcaggttgcttctagccatatctgcattgtccttgagagggatgagtctctcaggcctgcctaggaaggaattttggcagcatggagaagagaaagtgctcagcccggaacaaaagttttcacctactatgttgcagagaagttggcgtatcagtaattataaaggaagaatagggatttactgggtgatagagcaccaaatagaatgaatgcaatacatacttgaagtaaatcagagtagcttgtattgatctcaaggggagaagaaacaaagcttagcttaattctcatgcctctgttgttacttgtttgtaatggacatgacacttacaaggtatcctataattcactaacgggatttttacttatgattaatatttaactctccacaaagcttggggtaaactgtgaacttaacttgctgtgaacccgaacatgaactcacatacttcagttggaggcctcagtagtagcatgctgtacaaaaatgaaactaaagctccagggagtatttgggaacagggcaaaagggtaatggctcctccttatagagcaagcctcaggcctttacctttgtgttttgaagatggagaggatgcacttctactctcgcccgggttgtagcatgcttgctaatgatgtcaagagaactagtgtcagcactgaccatagatgtgacaggtaacagcctgttattttgtgccccatgtcatggcagccattgattccgaggtgtttgatacacactttgatagaggcagagtgaagcaggacatggacaagcatctttccgtgtagtttaatggtctcaatctagaaagcccactcagataattaggttgcttaaaatgtgatgagactagggaatagagccatatagaagtgtgtgtgagagagaattcagtggtttagtatattcacaaagatacacatttgacaccagcctgggcaacatagtgagaacctggctttaccaattaaaaaaaaatagaatagcagaagtaatcagtgaaaggcattttaatacaattatatctagatttattaaaaataaaattttagtccaatttaattaaaggccagaaactagatttttaaagaatattagtctttctcatattttccccaaatcagttgctttaaaaaaaaaaaagtgtgcagatgcctcaggcacaataactgtactcaactcaagaatttgcaattaagaaaaaaaaaaatcaaacctcaaagaagaaatccagcaactcagaggttcaggttcatttaaacatgcatacatttacatgggcacactttttttgttttgttttgtttttaagatggagtttttgtttgtcgcccaggctggagtgcaatggcgcgatctcggctcactgcaacctctgcctcccgggttcaagtgagtctcctctctcagcctcctgagtagctgggattacaggcgcacacaaccgcgcctggctaactgttgtatttttagtagagacaggttttcaccatgttggccaggctggtcttgaactcctgacctcaggtgatccacctgccttggcctcctaaagtgctagcattacaggtgtgagccactgcaccagctgggtgcacctttttgtttgtttgttttgttttgttttgttttgttttgttttgttttgttgacatggagtctcagtcacccaggctgggattcagtggcacgatcttggctcactgcaacctccgtctcccaggttcaagcaattctcaattctcctgcctcagcttcccaagtagctgggactacaggtgtgtgcaaccacacctggctaatttttgtatttttggtagagatgggtttcaccacgttggccagactggtctcgaacttctgacctcaggtgattcacccaccttggcctcccaaagtgctgggttactggtttgagccaccacacccaaccgggcacacgtttttagccaagccataggtctgattaagtacagtcagattccttgagcaggttacaaagctgtggatttgaatggagatctttagttcccttgcagaacaatgagtttccaaaagcagagtggcttacagcctaaccagctgcttctctcagcctttaaccattttgccctcctgaaaattcatctttggtttccaaccacctcttccaatatgcctgactttttgtgattctgttagtagaagagtaaaaagtcaaggggaggcaagaatgaatgaatctcatataaaaatgatgctcaagagaatcccttaattttcaagacagcagcccaaattgtaaacattgagacttttacagtgttaaaaaaaaaaaagtgtttacaggccaggcatggtatctcacacctgttatcccagcactttgggaagctgaggcaggatgatcgcctgaccccaggagtttgcaagcagcctgggccccatagggagaccaaaaaaaaaaattgttgttttggctgtagtgtcacaggcttatagtcccagctactcaggaggctgaggtgggagggtcgctggagcccaggtgaggtcaagcctgcagtgagccgtgatcacaccaccacactccagccttggtgacagtgagaccctgtccaaaaaaaaaaaagattaaggcagaggaaatgttaaaggttacgctatatttagttgataataatggtaagactgttcaggtgttttaactatgagagtagggttgcctctttcttaaatttatatatgttcttattgggtataatttctagacagaatatgcaagtatcacagaatatggatggcaattttatgttgcttgcacgtgactttaggttcttatgtttcatgataggagcaaagaaaagtcttgcttgccaattcttatgattgcatctgttctggaaatttactagcatttgttacccaggatttctgaagtgctggtgactgctgcccagtagtcttggtgggcaaagttactaaaatgcatcacgaatccttctggtgtttgcttgggctatggcagggtttctggaccttagtactattgatgttttgggccagataattgttgcggatgattgtcctgtgcattgtaggatgtttagctgcatcactagcctctactcgatgccagcagcacccccaagtgatgacaatcaaaaatgtcccctgggaggagtaggggatagactctctctggttgcaaaacactgggctatggtgttgagatctgcagtgatgagcagctttagatatgtgaacagaagcccaggcgtggtggctcacacttgtaaccccagcactttgggaggctgaggtgggcggattacttgagatcaggagtttgaggccaacctggccaacatggtgaaaccccgtctctactaaaaatataaaaattagccgggcatgatgatgggtgcctataatcccagctacttgggaggctgaggcaaagaaatcacttgaacctgggaggttgaggttgcagtgagctgagatcgtgccattgcactccagtctcggcagacagactgagatgccgtctcaaaaataaataaataaaaataaaaaagtgaacagagaaatacccgtgcaatactgtgtctcatcccccaaagacggagtcttgctgtcgcccaggctggagtgcagtgacacgatctcagttcactgcaatctctgcctccatggttcaagcgattcacctgcctctgtctccgagtacctgggattacaggtgtgcctcaccaagaccagctaagttttgtgtgttttttttgttttgttgttttttgcttttttttttttttttttttttgagacgaagtctcactctgtcacccaggctggaaggcagtggcacagtcttggctcactgcaacctctgctgcccaggttcaagcgattctcttgcctcagcctcccaagtagctgggattacaggcacctgccactgcgcccggctaatatattttttttttttgtagttttagtagagacagggtttcaccatgttagccaggctgatcttgaactgctgacctcaagtgatccatccatctcggcctcccaaagtgctgggtttacaggcatgagccaccaagcccggctggtctcattttaatgtaagctctaacttctgtatcactgctttgcacattgtagataaccagtgaacattttttattgtataagaaaaagtaaaataaacaaaaatatgccaaagcaaatatgataaatacacatttagtaaggtaaaagcaagtatttgataaaatgtgtaatgtagtctagtagctttatttagaaacagaaaacaacataaaatgttgacttgaaacattgcgtatgcatatttgccatgtagacagtgagatatggaggtaaactgctttcctagttttgttttgtttttttttttttttgttcaaaaggaattcactctccccttgtccactgttataaaatagcaaatggtgattagcatctgtgctgtaaccagagacactgctgttcccagctggaatctgtaggttgtttgcctgctagagattgtgacaagaagccagttaacatggagaggtgtacatgtcagtcttccccagaaaaggacatgaaacagtaggaccatccttccaacccatgacctacatctagaggcattctttttttctttttttttttttaaaccggaacagaaatatcatctaattctttctttacagagaagtggtataaggaagtacattctggccaggcacgatggctcatgctgtaatcccagcactttgggaggccgaggtgggtgcatcacctgaggtcaggagtttgagaccagcctggccaacatggtgaaacccctcgctactaaaaatacaaaaattagccgggcgtggtggcacacacctgtggtcccagctactcgggaggctgaagcaggagaatcgcttgaacccgggagacggaggttgcagtaagccgagttcactccattgtactctagcctgggtgacagagcgagattcgtctcaaaaaaaaaaaaagaaaagaaaagaaaaaggaagtatattctaagcccttgaattgatcttggctttcttcattatttttacaagtaaaaataaaaactttgatatttctgatgttctgggatattataggaatgataccacttgaattcagctttctaagaagtctggtatttcaatagtcttaatatgagtaagaaaattatgatcttggtactggatctaaggcagaggtatcgaagctgttttaatgttgcttgagataggacagaacttcagagtaaaataaatgtgtatagacaatctgttcaatctgttcaaattaagttgttgagctgtatatttgaatcttaagactactaattttgttgtatctgtcttttcccaaatatatgtgtacttcttttaataagccaaaacctatgcaacttttactaattcttccctaactacttcttttggaaaatgattaaatcttatgtctcacgttttgacatatctattgcatttaaaagataaggttgatcatgctgcttctcaaactgagatatccattcgagttatccaaggcccttggaaaacaatcgttgttgagtctgtatggggggcctgagtcccaggtggtgttgactctgctggtccatgatcctattttgagtagtagactctagtagcgtctcctgccttccatatggtgcagatttgcagcattgagacaggaagtaagaaactgaaaaggaaaaccattcttacctttggtgttattgttcttggtatattacagataccaacaagtatgaggcaatcctgagacatctacctactgagcttttctttccttaaattcacacctcaagaccaaggaaaccgaaaaactcttacagtctccctacatgtgttcacttgtgcccctatttcctgtcattaacatggtagtgtagccaactcctgctagcctgtaaaagctaattattacagtatagaggaattttgtaagccatagccattagtagcttgaaataccaatggtgggagtatttataccatggcagttggcatacactgtaactcaagagtgttctatttgtttgtttttctagacagtgccagtttcccagcatactcctgtctctcattcagtaagacaaagcacttccccttattttccaatacaggacatgatatcccgagttttgagcttcttgttaatagcctgttgcacgctaaccacgcagctcagtgaagagcaagtttattcccataacaaacaggaaacaaaggttgaggaaaaaccacagtggtacccttttgtgagtgttccctaacaccgtcacgggagtcctgattagtctaaatactttacaagtaaatctccttcaggtggcattttataaacaatctttcatcatggagagatgagaattgggtcaggtataattagaatgacagatgtattggctagcctgagagaattaacgcaattcagtaaaaaggctagccaactgcggatatcttctagttacttccgtgacaaattagcaccatcctcttgtactgaagcagtgctttcattagcatgcacagctgtttgcatcatctttgtttgtatttcaatccatatttggagcttaagtgagatttgtcataagacttcagttcaagcttgcttgcctaattttacatgcttctatttagtaaaatatgattactaggtcataaatatttgataatttattgccttattagagtaattttctaaacatgttttttgacgactgcttgccactacgtacaagcacttgaaaaatgttcttttctattaaaagtacatggttccagaattgggaaaatcacgttcttaaaaaataaccagttttctattgtgttggcttttaaaattttttcatcagtagaatcaaatgcaaatattgtctgcttatttttcaacagaatacaagtttgattttaataacttaggctcatgaaatgtcaccacgtagtaatacttagaattacagcaataacttaggctaaaaaaataaagttgttatgaactacattgagctcagacagatatatgtattatgtaaacatttatataaaatgtatataaattgtatattgtattatataattatatattgtaatatatagtatataatatataatttataaatataatacataaattatatttataaattataaagtttttatataatatattataatctaatatattataattatatttataaattataacgtttatttgaaatattgaagttttgtatacttagtggattttaatatttatgtcgttttcattttattccactgttacattaaggaagtaacttattacaaaaataaattatatttgtcttacatttgccctttttactctacttaaaattggagaaaaagagttcaagatagggaatttctgtcagaaaggagaaatagttgtattatgtgaagtttaagtagatattcttgtagagtatggagaaaataatgctataaaatgttgccttttaaaaaaaagttcagaaaatatagttcctagctctctctaaatgactagtttgattgtgactgctttcccaaaatttgtaaatttaaaatttatacatcacatggaatatagttttatttcacatacattccagtaggctgagaatacttgaaattcaatgattaaaaatgaaataataataaccagctttgctttattctaaaaccagctttattctttatttaccactttatttacagcgaattatttgctaatctgttaactttgcttcataagaaggcattataattatcgtacatttgaaagtggagattttctccccattctggttgccagtttcacaactgtgttcattctaaatttattaaaatatgtaaaatcagctttctaaccttggttgtccacaaagaatttcactccaatttgaaatatctattcagaactaattttttgtggttgagcattattttttgaacaatgaattgcataatcattttgtataatccagggagctctggcttagattctgtattattttgtgttatactgatttttagaaaatggaatgtagcgttgacacgagcacaaatctcagcaagggcctaccttacaaagataaaatgcgtggagttttattagaagcacatgattttgctttgtgtttcgtatacaccagcatttcagtgtagtaaatggcattttgtcttgaagagtgagcagagttgttacaaaagaaggcataatgcttccttgccagcagaattcagataagtgaatatcagaaaagctatttgtgatcttgaaagtgtaagaaattcaacatcaataaaggattgtggttccttagatagccatgtaagtctttgcctatgtttctaacatttctctttaggaaatattcttgcttttatttttctgaacaaattttctccattattatctctgatatttactttgaacagaaaggtggattggaaatcaaaaaataagtttgatttcaaaaatgatttcaaaatgttagttttctcagtattttacattttgagaagagaacaaagaaggcagatgaagagttttttgttttttcttaaatttgttttcttttcaactttatttttaattgacataataattacatatagtatacattttgaagatacggttttaattttcacaggaatcttatttgggtttagttatataaggtctaattttgcatcctctacatttagtggctgatttataaatttccactgagtgataatagtaattaatgtgaaacaggttttttgctgatgtttttagaagtttcagtagattaggaaggaagaaattatgctattgagaaaaatagaaaatgtaaacataagcatttgaactctctcttgagatatttttatcttccatgaaactagatgcggcttattgaagatgtgtttcaggtctcagtgctctaaaactcttctacttggtgagcatcttgattggttagatctcttactaatatcccattgctagagagggatgtaaaggaaattttctcaaactgagatttccaaatcttccaatctctgagtcaagtaaagagacaaggttagaactcttaggcaaactgaaaaatcaatattcctatattatcattatttttttctttttttgacaccaagtctcactctgtcgcccaggctggagtgcagtggcactattttggctcactgcaatgtacgcttcccaggttcaagtgattccagtgcttcggcctcgcgagtaggtgagattatatgtgcacgccaccatgcccagctaatttttgtatttttagtagagacagggtttcgccatgttgactacgttggtcttgaactcctgacctcaggtgatctgcccacctcggcctcccaaagtgctgggattacaggcttgagccaccatgcctggcttcctatattcatttttttatgtgggctttttaaaatcttttcaatagcaaagacttgacaccaacccaaatgtccatcaatgatagactggattaagaaaatgtggcacatatacaccatgaaatactatgcagccataaaaaaggatgagttcacgtcctttgtagggacatggatgaagctggaaaccatcattctcagcagactatcacaaggacagaaaaccaaactctgcatgttctcactcataggtggaaattgaacaatgagaacacttggacacagggcggggaacatcacacaccagggcctgttgggggggtggggggttgggggagggaaagcatcaggagaaatacctaatgtaaatgacgagtttatgggtgcagcaaacaacatggcacatgtatacctatgtaacaaacctgcacgttgtgcacatgtaccctagaacttaaagtataataaaaaagaaaaaaaattaaaaatcttttctttgagacaattgtagatttacatgcagttgaaagatttaatagaggccgggcgcggtgcctcacgcctgtaatcccagcactttgggaggccaaggcaggcggatcatgaggtcaggagatcgagaccatcctggctaacacagagaaaccccgtgtctactaaaaaatcgaaaaaaattagccggtgtgtggcgggtgcttgtaatcccagctactcaggaggctgaggcaggagaatggcgtgaacctgggaggcggagcttggcgaagcctgcagtgagtggagatagtgccactgcattccagcctgggcaacagagcgagactctgtctcaaaaaaaaaaaaaaaaaaaaaaaaagaattaatacaaagagaccctgcatagtcttcactcagtacagtatcacaactattaaattgacattaatcccttaacactgctttaacccaagtctatgctgctgcttctccgtgttcacttctgagaggcactggccatttcttgtgtgcttattcatactttgtgtaaaagcattagcatcatacatcgctggtgctgaccctaccctcagtcccagcttctcccagagtaggctaagattctcttttctactacatggaaaattgttctggaataataaagggttagcaaaaaagtcagagaaaacaaacagttgcattccctttccctgtagtagagtaggaatataattatgagtgatagaggatacgttccattcctttcccagtcctctccgaagtcagcttcactgctgtaggaagttgctgttctcattatttccctgagggaaagtgttgggaagtgagagttgaggtgatggggaatcagggttgctgacaattgggggaattataacgagaagctctttttcaccaggagaggggttgcatgttaagagaaggcctatctgctcatcctccatgtcagcagatgagaaccagttggacaaggtagctgtctcttagagattgagaagtaacaaaagcacactgtcagtcctgttcttccagcctcacgtacatcttctccatacattatgtatttgacattaaattaacatacactgttacacccattcctgaccgcattatctcaggtagccttttgtatttgagtattgtgggatctgttgctattgcccatgatgcccacttggactccaccaaggcagtgaaactcttgggggccgttcaaagtcaagagtgccaactgcccctaacaggattgggagaaccaaccaacactccccgaatagggactaactcactcttttcttggcctttatgaaaggaaggagttaaggctcttacagctggagactccagcaagagttgtaggctcaacgtgtagcttatactatttacttaattaacatgtaaatggattttgagttctgaatgcttgttctagttgattagggctcatttagcctggcttctacgaattagctataacaaatggtttcatagctgttatagaatgaggcagaagaaaataaaatgaatgtagcattatgtttaattagtggtataggaaaatgttaatataatgccatttagattctggactggggagattgtgcctttatcataagtaagaaattgttgctaggtttcacataagggcacatagttatcatgaatcatctccttcgatcatcattcttttatcccattacttgacttgcacccatccaaaattctaccacttttatttaatatatagactcataaagacaaggtttgtgcatctgcagagctgtgatgttcactgcgaggcccgtggcacacatctataagaagacacatatttggtactctaagatgatacttttttttaatgccaaaatgtgagggtcagcataaattgccaaggcatggtaaattttgttgccaatgctcccgtgactatggggtgaagggattctgtgcctcccttggtagcaatgaccacggtgcttgcaatcccagtgccaattcccggcacagtgcaggctctggaggcactgctgccttgcagtcttattggaattaacactgcctgagtaagagattaataatgggtattgttgtgtcttagaaacgttaaagagcatgtgacatgaatatgtacacattggtgaaggagatacagagaaggaaagcaaagtgaagctgtagatgtttgttacaactgaaggtaagctctgggagcagagaccactgctggctatagttgatgggatccacaatgtcaatacaaatggggactaactattgttttacttccctatacacgttgctctttcagtagatgcaataaagtactggtaaaaccagaggtggctaccatcacgatgatgtcaacaggagggacagtcagcactaagcccagaaggtgtcaaacactccgcaggagaaatgcgccatgcaacggacatgaagatgatctgacactcttcacgtggttttcagatggaaacgtggctacgaaagcatcaacctcattatcatccatcattaaggccatctcactcagtactgctgctttcaaagtccacgctcccaaagcaaattggatttctgtacacaatactcttacaggatgaaacccaaccaacttgttgacgtaagtatcccatctacttcgcaattttatttatcttccaaaattaaaggactggcaccctgatttattaaaagtgaattgggtctagggaccatatcccctctgagttactgacagagcagcttctggcctgtgaagctcaaagccatgcctagatgtgatggatccttgtctttgattggctaattagaatcaatctgttgaaggaccagtggcagtggctcacgcctgtaatcccagcacttagagaggctgaggcaggtgtatcacttgaggccaggagttcaagaccagcctggcctacctggtgaaaccccatctctactaaaaataccaaaaaattagccaggcgtgctggtacaagggtaatcccagctacttgggaggctgaggcgcaagaatcacttgaactcaggaggtagaggttgcagtgagccaagattgtgccactgggcggcagtgcaagaccctgtctcataaaaagaaaaaaagaatctgttgaatattcctaacttggaagtaatgggtgatgcgtggctttcatcttttagaaaggtgttttttcctctgtcagtaaaactaagaagacatctgtgtgtgctaaggcgtcagtctagcaagggcagggcacaaacccagagagagaattgggctgttgtttcacttccaataaaaatgggatatacatgggaggtagagttataattctactcaggattgactttatacatgcaattggatgggtcactgattgactttgaggcaatcagggatgagtgaaactgatcttggggagggtggcaagacatgttgacaggtaagatgtgttttaatgtataacagtgcgtggtgtgtattaatcagttggagttgattgactgcgttttattgtttggaacattcctgcccaagggtcaggtaaatatacaaaatatacaaataatacagatttttaatacataaatatcaattaagtagcataattaaataatacattgttatagttgtacttaatgtgtatgtaaatatatacaaataatacagatttttaatatataaatatcaattaaatagcagaattaataatacgttgttatagatgtacttcatgcatatgtaattaaattattaatgtataatatataaatacatattttaatatacaaataaaatggtcttaaatcagagttaatttaagaccgtttatattagtacatatcttaatatacaaatgaatggtcttaagttaatgtcattgagtataagtcacatttacagatatgacatgtgtttccagataaagtcaatggacagacagcttccaacactggaaaacattcaaaatatatgcaattaattttatatttgagttaaggcaatcatttattaaggaaagcaatcagatgtttgtgagggcttaaactttcgcttcataaccaaagcagtttccttacatgaaagttgacttcttaaaaagagaagtttattttttatgatggaggattgttgtgatgtgcagataccttccgtcatttcatactcatctaaaagcagccaaatgatcttttcacctttggccggaatccttttattgctaccgagtcctgcactcattaaaccagatgacagtgcatgctctgagaggtgtaaatctctagtcctggtggccagttaaattcctcagtaaatgtttggtagatgctgcctaataaaccagtccaggttgccactgggaggattaaaagaagtaaacgtgtatacatgaacagagagacagtgccttttcatgctaaatgtggttccccacatctcctctgattagaggtgtgctctgaacaagccgagacggggccgtgccgagcaatgatctcccgctggtactttgatgtgactgaagggaagtgtgccccattcttttacggcggatgtggcggcaaccggaacaactttgacacagaagagtactgcatggccgtgtgtggcagcgccagtaagtggacccttcttcgagcctggccacctttcgtctctctcgccactgactctgctttttgtaacagattgattttcctggttcttgggaatgggcctgttgctaccactaaccacatttctgtccacttctctaattgctcagagtctccgcagtatgttcaatcatgagcacacctctccgtctttccctgataaagcatggccatggatgtgttctcttcctagctgtagcacatatgtcttgcaatccagagggacttttgagtgcttctcttttaaacaaagctggagtggctgttttgtcttctgcagccagccgtttctgcaaatgcatacttatgtgtttgtccgtgtacatatgtgttcatgtttatgcatgtgcactacctgtgcagatactgtctaccactggaagcctggctgatgcagcttgagttgcattgataaggtgtatggctgtgatgaatacctttaagttggttcataacatgtcttttattgtgctgatgagggaatgtgattgaattgagctcatgcatctcaaatgccggagggtagaagtgcccgtcttgccccctccgagctcagcacacagacatttgccaggtcaaacttctgcttcttctcttgaaagtagaagaaaacttttgacttaacgtgagaaactttcaatgacataaggctcgaggaacataattttattttttttgtttttttaaagacagggtctcattctgtctcacaggctggagtgcaatggcgtgatcttggctcactgcaacctccgcctcccgggttcaagtgattctcctgcctcagcctccccagcagctaggatcacaggcacatgccactgcgcccggctaattttttgtatttttggtagagacaaggcttcaccatgttgaccaggctggtctcgaactcctgacctcaagtgatccacctgccttggccatccaaagtgctgggattacaggcgtgagccactgcaccccgccagaacataattttcaaagtctttctcttgaacattaagcttttcataattccgggggataaaaatatgaagtcatgatgacttaagtgcatgatgaaattttccccaaagaggtaattctcaggaggtccagtaccagatgtgagacttccatgtcgttaacagacttccaagtgaaattcccaattgtgcttatttatttatttatttatttatttgttgttgttgttcatgagtaggaagtatgaactactcaagaagtaattattcagctcagcttgataactaaaaatgaaactcaataactgtgtattacttttttgagagactcctgcctaattctccgctgtgttgcaagggtggcagccacatttcctgcctgagattcctagggattatataaattgttttgcagcaagatcttaggattaagcaaaacaacagaagggcctgcaccattaatacccccactgtaaaggagcccaggatctaagaggaatgtaatggaaaagctcctgttggtctcctgccatcgccagtgaatgagatgactgcttcagtcccatgtgtgaacaggtgtaggaactgataacctcaagggctttttttttttttttttctggctctgattggatgattgcagcttctggatcaaaggactcccttcttcagtttcaaacaaagcagtcaattaggtcaggtattgcgaacacaatggagaattctgttgcctgcagcctttggaacaaaggccttttgttacagtgattctcactggtttagccggtgggagaggtttcctggcagatttgcaacttttttctccctttccctgggtggattcattttctgaaatatcatgtatagtttttggtaataagagatttatttggttttaattattagcagtgatgaatttgcttcaagagattaaaattctctccacctcaccccagtactgccatcccttcacctaacactctctccctttgatcagtttgggctgggagtgaccagtgggcacctgtccaggtgtcctgggtggcacacagtttgctgagggttttgcaaaaggtcgatgctcccaacagagatgtattagatgaggctagctatgcctgattttagaggggaaaggtgacagaataatgtatgaagaaggcaaaggctgaagatcagttagatgggtggacaagaataagtagagagtataagcctcagcaaacagccagagccgagagccacatgctgtcctatgaatgagtgaaataaatggagtttttgtgaaaaaatgcatcgaagggaattggggatatttggcacaaaaggagcaagaaatcctcttctgttaagaaacctgttgttactcggatatactatcagagacaaaatatccagcattctcaaatgttaacttcttacgaaaatagatcttatgtttatatgttcattttggttttgttggagggaccaaacctaagtgagtgattttgtttgttaggttgtttttttgtcagtggactcgtgcatttcagccatcattcccatgtttctctttttgtttttagttatgttctcttattttttccatagtgtcccaaagtttactcaagactacccaggaacctcttgcccgagatcctgttaaacgtacgttgtcattcacctgagggaagggaagaggggaggaggatgctgcttggttcacataactccagcatcatcaccttctttgcatggttttgtgtttcttgaacacctgtcttagtaaaatgtttcttcccattaccttgcttgtaattacatctgattttgccagacagcttgagatgttgggctaagagcatcattgactaagtttcttctatttctgaccaatttcctttttatttagtctggttttattgaatattatatggacaacatcattgtattgtatttgccattactattttatttcctaaaagctatcagtgtaactgagagcaggcttagcctctcactgcttttgcagaactgaagaacaagggctaggtgcagtggaaggaaagtgactttacttagcaaagctagcaatggggaaatggtccaggctcctgcctcaaagcaaccatctcaaattttggattaaaaaacaaaggcttaaaaaggggagcttggaatgcagggcatgaaggaggggtgaggaggtgctgctatacaggacttgttccaaagacttgagttattatccagttcggtaagtgggctggcgcatcccgcacaatcgggttgtaaattaactgcagccttgaggtgatctcctgatgagggagaattctgaaggtgcctaagtcagtcagtggaacttctaagcaagcattaataattttaataataattataagcgtaattagataatggaagcgctgtgcagggagtgcctggtgggaagaaagagagcaaaggttaccatttcattactaaaactggaaggaaaagaaaggaagaaagatctttaaaatagagtactcggttacatcaagatgccatgatttaacaagagactataatacataagtaacttgtttcctcagaaaaagtacttaatattcatggtattgtagtacatggactaattcgtacacgcagatttcaatttatgtgtgttataagacccggtttcaactttagacatgaagggtcacttttagacattaggaacccctctttctcctctcccagaaggcataatggtaggttagaggtgctcaccttttgactaggaagtagagaaagagcctcctataaagaaatgcattgtccagccactgcaggccttacttacagtgtcttatgttttgtttttatttcagttgtaatatcagacgagtttagttttaaaatgtggttttagtactcatatttgaatttggattccatccagaaatagatttatccagtgttaggttagggatgatatatgccatttatgcttatgattgctggaagaagaggcacaatttcagttgtaacttagatattttataattagcatttgtgtacattatcctgaaaaaaaaaaaccctcatctcaaaactgatgaagccagttatcttttttaaagatgataaattatagatgaaggattaggtattttaaaaaagactgcatcctaaactataaagttttttaatggcctccataaaatattcagaataattcacattatgtataacttttgaaggatgtggtttgtactgctgcaacataaacgtttcttttgctgttgtgaaaaaagcatttttctctaaaaacactgtaagtacagcaagtgggttgacagactaggaaaaagctctagctattccactatagtgttgacataggtacgcatgttgagttgcattgtaccgagcattttcacagatcatttaatttttcttcagaacactttgtgggcattttcctcattccttttgtacatacgagaaaaaatgaggcttcaagagcttagtgacttgtcccaagccatcgaacatggcaggaccaggctttgaaacccaaaatgacgttttggccgcactccacaccaaatggctaagcattggttctgacattgttttgccggttagtgaaatcacatttgcgattcagaagcacattttaagaatacagaaaacagtgaaaagaggatgaagaatgttaacattttttcctaaatgccatgaatagagcacgcatcagtaaattaaatgtctttcccattcttttataaaacagtgattatttttctcttgtttcattttagcatttataagaattctatttttccatttttaataactgatggaaacaagcatcattgtctgataaatttattttcatgctgtacacgtaactaccactttcatcatccactgttccaaacagatactgaaagtctcttttgtaattttctccttcccagtaattttctccatctacttgcagtgtatttgggatcctgacacctttccattctaggaggatgaagtgctttgggcagctatattttcttgtctgcctacagagactattcaatcacagcaagtgaagggttttgcagtgctagtacaaacagacaaggaaaaaaacatataatttctagttatttatagcctgtgcagctatgtggtcttatttatagcaaactgcacatttgatttgaaaaagtcatggtcatctggaggtcaaattcagatggcagactcaattcagagaaaaggagctgaactagaaggtaagcaagcctgttagactgggcaacttggacttgactttgctccttcaacaatctagagccagttggatgatatttctgcacaaaggtggttggttttacaggttgctcagtctaagctgcttctagtcaaataacaaatgtgaaaggagatagaaaaagctcttcagttgaactgataaaagattacacttagggagaaaatgtatgatggtttgcattataaaaacaataatttgccataaatcaggcatttctaggtttcaaacttttgtcataaaaaccaattttgagcattgcaattttagggacatattttattgttgttattttaaataaaaatctaaaccacaaatataaggctgagagctttcattttattcgtgaacataggaattcaaatcattaaaaaaaaaccctttctcatttgggataaagaatcttacgagagctgagttaatttctgacattagttttgcacctgcccatttgggtttaggacagtgcaaaaggtttcacatttaatcttcaaaatatagtatttgtagacaataaaattatataaatatttgtggattcatttatattttaaatatgagagtgtgaccattttttcctggtgctgtctccatcagactgcatcccaaaaggcaaacagaccaactccttaatggcatttaatctctcaaagagcatcatgccaatttttagtcagcagattgcaccatgtgatctggccaaagtgtgtcccatctcaggctccttcatttgcgctgacatgtggtacaaacaactaaaccaaggtttctcaacctcagcactattaacattttgattcaaataattaatttttaggagtctgtcctaggcatatgggtgtttagcagtacccctgacccctacccactaaatgccattaacacaactccagctgtgataactaaaaatgtctctagacattgctaaatgtgcccagggggtcacattctggttgagaatcctgttctagagtagtagtttccccacatctgactcagagatagaactctcctggtgtaaacacgtgtactttccacaaatttgggggcatgttgaaatgttagaatgtcagcatcatccaattctcgacagatgtttgaaattgaatttgttagactattgtccaagctctcaatatttgcaaggtaaagtggaagttgctgttgctgtcctgactatagtattgaaggtctcgtagttttcctgctctaatgtaagctactgtggcagcagaagagaaaccagcaaatcccttagtttgaagtcattggttcacctatgcaccacccctttctcctctctgtttcatcttagtttcctagaatcccaggatatgctggaggacaaccatctgtagagatgtcctatagtcttgctacacaggttatttgtactttaggattatgtttgatggccttatagtttgtgcagaggtgtaggcctgaccccatgcaggattgagggagggaaaaagattgatttctaggcacatcagaatggtccagatgacatgaaacagactggtacacttacagagaatatgaaaagaattggaacttaacaagtcaggccccaagttccatccccaggttccaagtttgttgccgcagaagctcataattttcaaatcgtagaaaactcacaccacgcagcctttcaatggaatatgccaccttaaccccagggtcgttgtaaagacaggagccataagacagaagtctgaatgcctaggccatttaatctttggccaaatttgaactattgttcttaatcacactattcttgttcttttcactgtgcagtagcaaatgttagttcccattagcacattctgcaataccattggaactaaaactgccaaattagattaggcaacctgggattacactttgctccccaaccaacctagggagggagaacaattttaaagcattaaaagatgtgatggtgaattaaactacctgtcacgtcagtgccagtatattctatcagattaacaagtgtgaaaagctaaatctttggtatctggaaatgcttagataggaagaatggctttttcttcaaagccataataattagagatgaccctaaaattgaaaggaactggattgcttagcaactcagcattttttaaaaagaagggccatctactttgaatacaggttaaatatctcttctctaaaatgggaccagaagtgcttcagattttggatttcggaatattgatgtattcatgatgaaataacatgaaattcatttatgtttcatgtacaccttatacaaaagtctgaagataattttatacaatttttttttttttttgagatggagtctcgctctgttgcccaggctggagtgcagtggcgtgatctcggctcactgcaacctctgcctcctgggttcaagagatccccctgtctcagcctcccaagtagctggaatgaatgacaggcgcctgccaccacacacagctaatttttgtgttttttagtagagatagggtttcaccatgttggccaggctggtcttgaactcctgacctgaagtgatccaccagcttcggcctcccgaagtacttcgattacacgtgtgagccaccacgcttggcctatacagtatttttgataattttgttcatgaaacaaagtttctgtacgttgcactgtgagagaacaaaggtgttgctatcccagccaccatgatgtcatgtcagtgctcaaaaattatcagattttggagcatttcagattctcagattagagatgttctacctgtggtaaaagaatgttcattatgtctctgctctgttgtttagctatttgccaaaagagggtaagtggatcgtttaataaagtggtcagcaaatatttttcatacaaggccagattatagatattttaggctttgtagatcatgcagtttgtcataactacttaactatgcagtggtagcatgaaagcaacaatagacaataagtaaacaaatagacaaggctgtgttccgataatactacttttataaaagtagccagcagctgggtgcagtggctcacgcctgtaatcccagcactttgggaggccgaggcgggcagatcacctgaggtcaggaattcgagaccagcctggccaacatggcgaaaccccatctctgctaaaaacacaaaaactagctgggcgtggtgatgggcgcctgtaatcccacctactcaggaggctgaggcaggagaatcacttgaacccgggaggcagaggttgcagtgagctgagatcacaccatcgcactccagcctgggggacaagagcgagacttcatctcaagggggaaaaaaaaggtagccagcaagctgatccttggtttaatacagcaggtttttttatttttatttttattttttttccaatagctttggggatacaagtggttttagttacggggatgaagtgtatagtggtgatgtctgagagtttagtgtccccatttcactgagtagtgtacattgtacccaatacgtagttttttatccctctcctccttcccactcttcctcattctgagtctccaatgtccattatgccactctatgcctttgcataatcatagcttagctcccaatttataagggaatacatactgtatttccattcctgattacttcacttagaataatggcctccacctccatccaagttgctgcaaaagacttttattttgtggtttttctggcctactagtattccgtggtatatatacaccacattttctttatccctcattggttgatgggcacttaggttggttccgtatctttgcagttgtgaactgtgcagcagttatttttgaccccaggatgtgcgaggccaggtattttgagagacaccagcaaaggaatctgagtactggctatcaatacctgataattttattaatgagttgagacccagatatgccgtagaggtaaataaccatataaaggaaatatagaagtgtaggagaagattgctctggaaggctggggtaaaatgaaatcagctttatccttaagacctccatagaggttaactgtaccatctccttttactgctacagtttatatgaaactggacaatattgaagattttgacttttcgaactcatctattgagtgttgagcagctatgacaggttatttctttatgtgcctccattaacgaagtcaagaatagcttctgacaaattgacaaaaaacaataacctaaggttaacccattctggacgccagttattgctattgcttcacatatattttttagattcaaacttgaggttgcttttaagttttagtgtgatgtgctgaatagagaatagatgttaataaaaaaataatgccagcattcgttccttcacattcagttcatatatttgaaaaaattcccatgtcagtatgtgtccatggacataaaaaagaaatgtagcttgactagagtaaacacatcatagattatatttttattaccttatgtccatgtgatgcattgatagtgttctccaccaactatgattgcactgactataaaattgtaatacaagggcatattagggggagaatgcctttgttttttcttttgttgttattttgtttttaagagagtctggtattacactggaggatcacaaactgtattttcttgttataaatggctcctctatcttggacttaatggttaggataaatatttgaatgtagaatgcgttaggagttttaactatttttgaaattaggaaaatggagagacactttttttttttttagagacactttttttttaagttataataagcatggcactcggaaagctctgccatgtttcaagattaaagtttcacatgaacgctaacaagtttatatttcactcatatataaatgatcctccttgtctcctttcctaaattatagccatctcaaatgacaacattgctgggtcggtatcaaatagcattttcaatgataaggcaatgatttatataggtcttaatttgttttaatcttctgttaccaaggctgtagagataaattgcttttctgctgatgaaaggagactaacccaattttcttgttagaatctaatattaatatatcgactgaatgccattcataagccttggtttagggaaacattcagccttctggcctgttggagatggccacggtcattgctgtttgaaggtgggtcatttcttcttttgtgtcctgagtccattgtgactgtaaaattatgggtcaccccagaagcctgaggaaacaaatgcatatcaaaatgataggggcaatctttcacagtgcctttaattttgaccccacattcttatatgaatgtgaagtaccacattagtatgaatatgaaatggagtgctccgcaatgattacaaaatcagaactaaaatgagggaaatcagtgcatgtacagttcaacttaatggattatcctctaaggagtcttcagacaggctaggagagtgacgtctgcctcatcctgaagatattagcaggttttcccctgttttaaagtaacttcccttcaaatgctaacagttttctcagaggaaacacaggtatggaaaatgtttcgttggtgtcttggccccagtgatggaggagcattttgtgataggaacgttgggtgcagcatcgccatttatgaataaactgaaagctaacctgtgttacttcaccccagaaaacagagctctggcaggtattgagaatagatcacagtgtgaagtggcagtattgtgacaagcatgcgtgtatcagtattaaaattgaaatgagccctcacgcacatgtgaaagcagtttctcccgttttcatattcagttccctgaggtaatacagcattttggtgtgagagaaagaagggaatctgacccttctcgtgtgggaagggggctgagggcaacaacctcctgtgacagccaccctggtccaagccaccttcatctttgtctcctttttttttttttttttttttgagacagagtttcgctgttatcacccaggctggggtgcaatggcacaatcttggctcaccacaacttccgcctcccgggttcaagcaattctcctgcctcagcctcccgagtagctgggattacaggcgcctgccaccacgcccagctaattttagtatttttagtagagacagagtttctccatgttggtcaggctggtctcaaactcctgacctcaggtgatctgcccgcctcagactcccaaagtgctgggattacaggcgtgagccactgcacccagcctgtcttttcctcttaaaagatcttccttctacttttgtcccatagcagccagagtgatccttcaacaaaacgccccatcacatatactccccctcaaacagcccacgctggtccctcagaatccttactgtggctttaaggctgtacatgatgtcccccatttcttccctgcctctcccactacttcctctcttgcttctttagctctggccatgcgggtctcgtggaatttgccagccagcttcaactcttagggcttccgtgctagttttgtcatctgcctgccatgtccttccagcagccagctgggaagatctgaatgtcacctcctcacttaagactctgcctggtcgctcacttactgcggtctacctttcccctctcccctcagctctcccgatccttctgaactctgctctgtttttctttttcctctttttctccataatacaaatcacatattaacaatatgacttactggcttttaaaaaattcttgtggtaattgtttctttccctagaatataattccaccaggatcagggccttcatgtttttctcattggtttctcccatgtgcctcacatataataagggctgcaatgttggtgggctggaggaataaaagaatgaacaggcgcactaaaggcaggatagtttgtccatgtcagagctgctgtctcagctgctttgatacctctgacttcccagggtggcaaagaataaggatgtggcttatgtagaaggcgttagtcatccaaaatgccactgtatatttggaagcaaatattcaccttgaagcagtgatgtactaggaattagaactgcttttctgttacattttttcatttgttatgagtgtttagatacacatgatcactattaaaaggaagggaggtaatagcctatatatcctaccatgcccctcaaggctctgttaggagactaaaatacaaaggtcatttaaaaagttaaaagcttatgcatgtgatgttggtattgctgctaatgactaggcatctagaggtcaaaacctagagctaaggatattgaaccctgtgttttgtctcgttttaagtctaggtttttgtggaggggggaacatacctagccagcttgcttgcagaaggcatgagtgagcaggctgaaggagggacccaaggccagaacgtcctccatattctagctccatgggctctttcacttgatccctgctttatgacccaacttctgttgaaggatttgccagatagtgtttggggcaggaacagctgtttcatagaaaacaagccaacggacatcataacaaagcatatggttgttttgccaagttgtgctgctcattaacaaaacaaaacaacaaaaaccctttacagtgccccagcatgtggatggattggccctttactactctaaaaattagctttacagcctttttatggcttacccaatcttaacagactttatttgtgtgtgtttagggatgcaaatgggtatgttaaatgatagtgttttgcctctacgcaataaaatagggtaattttttcttcccatgtattaaacgagaacacagaacatgcctagcatggtgggctctgatgaaaagaggctgttatcatttggccaacatggaaatcctagcctttatttatttatttatttgagacggagtgccaacatggaaatcctagcctttatttatttgtttgtttgtttgtttgagacggagtttcgctcttgtagcccagactggggtgcactggcatgatctcggctcaccgcaacctccgcctcccaggttcaagcgattctcctgcctcagcctcccaagtagctgggattacaggcatgcgccaccacaccctgctaatttttttattttattttattttagtagagacggggtttctccatgttgatcaggctggtctcaaacttccgtccacctcggcctcccaaagtgctgggattacaggtgtgagccaccccatccggccgaaatcctagcctttatcagaggttccgtggaatctcagaggtctgtgagcaggataaactgctttatggtagtttaaaatgcaaaaccagaaataaaccctcctaaagccagtttgtttccactttctaagtggttacagtgacctgtgttttaagtaccttaaatatatcagtgacctgctgatatacagcttcctgtttcctctgtgtcctgtgacatatcctgacattccttgagccccactcccttcccaaaaggaagtaccttgatgggtgaggacatagggcacacgtgtctctggccttctgtggacataatcacaaaatggtagtcagtcctatgaatttaatctctttaggatataaggatattcacgaaatagaagttgagctctctggacatactccaccttaaaattgctctctccttccgggatcctcaccagctgcagagcagtagtaatgaactattaaattcatttaacaatatcagcatatgctatccttctctgcttgactagacagtaatctggcttgctggttggtatgaatataggataatttcactcacactaattgagatggggagtttgtatgaatggctgaaaaatttgagttaaagataaaaagagacacagcttcctcaactatgggaaataactgggactgttaacaaagatttacttgaagagaaattgtattgctcagggttctccagagaaacaggaccaataggatatatatgtataggaagagattgattctgcagaattgactcacacaacaattatggaggctaagtcccacaatctgttgtctgcaagttggagacccaggagagctggtggtatgatttagtccaaatctaaaggcctgagaaccagggaagacaatggtgtaaatttcagtccagggagaagagaagaccaatatcctgactcaggcagccaggaaataaaaagggtgaactgctccatcctctgcccttttgttttcagaccctcagcagatcgggtgattcctgcccatgttgaggagggtgatttactttactgagtgcaccaattccgatgctaatctcatccagaagcaccctcacaaagacactcagaaacaatgtttaatctgggcaccttgcggcccaatcaagttggcacagaaaattaattaccacagaaatatttctggattcaatggattaagttggtaatatagtattcatattcatttccacgtgcctaaaaagaaggtttttatcctttttaatatcctcagtcctattaaacatacctcacattcatgttccatggttattctcttattatgttgctaagtgcatttctacttaggccaatctgattatagtgattcagattatagtgtttatcttctttcctttatacagtagacagtgttcgcaaaccataggagctgaaaaaatttccttcttatatagtaagttttatgattccagttttccaaaggggtgcttatgttatggttataacagttacagccagatgactatcttcatcagcaggtataaccccaaatatttatacattttcatttgtttcaaacataaaatatggtttgcctaaacatgtcattctgccagattggactatgcaaaagaatgttactgttttattttctgcttttactttaacttgttctcatttgagctctaccagttaagatgagaagatgactaaagctagggaagcacattttaaatgctaaataccatgttcatttcaagttgggaacttgaaatgcaagtatttttaacttaatcattaagttaaagtcagtaagaacgtggtatttagcatttattcattttaacttaatgattaagttaaaaatacttgcatattggtttgcttgaagctatggagaaaaacatttaccttttttccaaaaaggtcttaatattcaaaattattgtttcaatcttacaaattaacaatttacttatttttgatactttcggccttttttatgtgggctacacctaacattttttgaaaaatacatactgcttttcctgtaggttgcactttgtgatcctgtgtgtaattcattttcagtggttctattttatttattttttgttagtttgtattttcttttgtttctttttctcaatttttaaaattttaaaacttgtccttttcttttttttctttattattgcactcttctaccaaaacattttcagtggctttgaataaaagtatcagaactttcccgtggttagcattagctctgagatttgaacaggatgtattaagcagaggaggagggaaggccactaacatgtatgagctccactgtgtgtcaccctctctgccggatgacttacatgtggtatggtatctcattttcccagctctcctatcatgtcctgcggcatgttatcaccacttgataaaaaaattgaaacatggagtgcttaagtttcctgccccaggtcacagctgatctgaaaaagaaatgggattcaaatccaaatgtgcttaattgcaaatccccacatgactctttccttccttccttccttcccccgttgctgccaatgtaagaaggaacaccactccctcatttgctacagagaagacaggggcagctgtgtaaaggcaccaggaatatgccctgcctccttccttccacttgaaagcaacatctggatagacactcaactgcttttattttttgaaaaatgattattaatcaggattgaagtggagggaaaaaatcaaaacgaatgtttctttttaaaatgaaagatactgtttaattatttaacagccttccggttttagttaatatctttgaagactttggattaagattccagacattttcttgaaggatgtagaaaacgtatttaacttcaagtttagtttcaaaatgacttagctatcaattcttctcattgaagtcctctttgagatattatatcccaaatgtaatacacaggtaataattcaataggaatacttggaacattggtgatatttgaataaccttttgaatgaaacaattgatttgatctcaaaagatagtgaaaacgtctcattttgttttttatgttaaatatgcttcctcttaagtcaaaattcttttttctttttgcttttaagctcataaatactctgaattctcactaatcttttggaaaattgcttgtataggtattataattcacttggctcatgagttacataatatagcagtatatgttgcaattcaaatattgcttagcagtattagttgaattcaaaatagaaatcactttctttttgacaactagcataatgaattcattgactattgtcaaatttatgaagacagaaaagtccttttgtgattcaaaaatgtgtttattgatgtttatatatcttttgtcgtgtttccatactgtctcatgaaggttgtcttcgtaattcagttatctaaatacatcatacatttaccttttccctggggtgccgttattctacaacaggctaattacagatatctgtggtttctgcaggagtcttagtgtatgatattgatgatatcatcatttactttcaaaattgcaaaatagtaatttaggaaagcatggggatttggaaaaacatgtcttcagcaccaactgtttttgctctttgcatgcttgtttcgtaaagaactctaatgctataattgcaaaatggaccattttaaagatttttccttcattctgtacttgggagtggtgaaagacatccttactgtgctgcacagtgtctcatggtgttctcttaaacagcattaacgtcttgtatgcgctgctttactaaattctctgttctgagaaataactgaaaatacggctttctattaaacgagtggattattctgttgttgttggcttttttttctcaaacctccttctcttctactttatagttcctacaacagcagccagtacccctgatgccgttgacaagtatctcgagacacctggggatgagaatgaacatgcccatttccagaaagccaaagagaggcttgaggccaagcaccgagagagaatgtcccaggtaagtctggctcttccatcattcagccctacgatattgggaaacctgagcttgcctctgcctcagtctccccacaggcctgctggctttatcaagatctttaaagatgtaaagttctaattttaaatgtttactgtgtgggcacagtttgtgggttttttgcatcctccgtgaacatgctgcctaggaaggatccaggtatagttggattttgtaagcacaaattaaatgatgtctgtaacattctctctggcgaagaaaggtacttggcattattattctgtgtatatgtagtacctgtaatcaacatgttgtaaattaaaatccatcaaaatgctctttagtaaagatgaggttttgtattaaatcccagactgttataattgtgaacctacgattgtttacagtctgtaaaatcatagagacttaaaactgagctgaaccatagtgattatttcatctagtctcctaagtgatacatagtggaatagaggttcgagagagtggcttcccattttagcacaaagcaaaatcagtgagccagagacaacatttagaatccaggcctttcttgctcctagtacagtactcctttcattatactttgctgaaaaaaaaaaaaaaaaaaaaaacctgttttggtttggtttgtttttttttagcaggtccttaattaagcaaattaaaaaataacttatgtctaaaacatggctaatccatatatactatcaactacaattgaagctatgtctgctaccaggcactggatgttgtattggagtttgataatatggaggattttagcccttgctcagattcctcattcattcattcattcaatcaacaaatatggacttattattttccagtcacttttctgatttgtagtctacaaacctaggagtgaatgtggggggaaaagaagtaggacataaaagtgaatgaataaagatctcaggttaaagtaagccattcatttttagtgttaatattctgtggcaaatatcagaagataggagaaatttttgtcttagcacagatgcttaatctcttgagagacattaaatgcaatttatgaattagactgctgcgtattttctaagatcacagtcagtctttagtagacaattaatctttcctgtaatttctgatctgggtccctgctgaccccaggaagattcctccctcccagggccaaatgaatggcccctgagcatgtctttcccatgcaaaccagtcaatcaaaagctccttactcccaaccaccttcttatactctgggccactattcacctgctctaatcaccccaggaccaggtaccagaccactagggacaacctcatgccccatcaccattatttgaactaatcagtcctaaacccgcctaccctgcttcgctcattctttccatgaaaaccacaataaaaggctcttgctcatgttttcccctcctgaccaaccctggtgcttcccatatgaccctgcatgtagtggcatgtaccggcttcttgggagctgagtaacaaactgtcttttccatgataatcatctcctgacctcttggcctcacctgaataataagaaaatctacccttgaaaacataaaactaatagtttatctagaaaggtacaacacaggtactgttttttgtttgtttgttttgttttttgtttgtttgttttgccttaagatgaataacaatacttggatctactttggtataataacataaagaggaaaaaagccttataatcacagtacttttggctctggaatataatgtgcagttctagtggctgcccacgatgaaaacctaacagctaattgaactagaaagctagccacagggaattattaagttttcacctgatgccaagaaaatcagatctttccttaggaaagacacaggcactgttcggaaagcattggaggactatgaatcatacttattgccactgaaatgtcctcatttgaatttacatcctatctcccttctttatgaagctttcagaggcttcctgtgccctcacaaatccacttctgggcacatgaagtcgtaaaaaaagaacaatgacaaaaataaacaccgaatgctcagcttgtcattttcagcgcctaccactgtaccctgactctggtcttcctaccacctcttccttctcaactgctacccttgctttctgtacagcgttaagctgctgttctgatcaggccactctgctcatcgtctgttcatctcatcttgggcttccctttgcccttggcattgagttcttctggaaatgccctcccactcttcttcacgctgacacatctcacccattccttacaccccacttcatactcagaatgagacaggcagtcattgctcttacctttcatttaattctaaatatttgctccccggttttgttagtgatttctggacacacctgcattatctttccaagctggatagaaaccttgagacctcaagtcatgaagcctgctacctgcattcatcgtggacccactgtagcattttttttaatgtgtgtttttttaatcctggattttttctcctagtatatcttgttcatttttgaccttattaagaaaacttatttcaaattctctgttagttttagatgtgacaggtcttctttaaaataataatttaacttttagcacatctgtgtaacttgtgacttagttcatgattttgtagattttgttcatcttttagtcatcagatatatctgatataacctaagagatgttgtcccagagcagagaatgttgtctactagattccagtggtcataggaatgtgagacacctgaaatcaatatgtatcttcatagtctgtggtgctgaaatctagggacttttcaactttaaacttgcctgcctcttaaatctctacttagtagtagtcattttctctgcatgaaacagccaagtctttgaagattgataaatccaaatgaaattgatacctttgtgcctgcagtggaaaattgctttataagaatccatagagccactgcaagggccaggtcctgagaattttaaattttaaaaattgtgcggttttttaaattaagttttattgtagtttttgttatatgttttcttacaaatacagaggattttggaattttttcatattttggtttgttgttgccattgtggagtataactctaaacctgtagatttttgttgctaaacctgtagatttttgttgctatatgtcgtgactagcatctagtcaaatagaaatctacagctgaaccatgtgtgagcacttttattacttataaacttactacttttagtatatgcttaaaatgaagtccttcaaattgaaagctgacccaactcataggtttttatttcttatcttttttggagatggagtcttgctctgtcacccagctggagtgcagtggcacaatctagactcactgcaacctccaactccctggttcaagcgattctcctgcctcagcctccccagtaactgggattacaggcacgtgccaccacgccgagctaatttttgtatttttagtagagacagggtttcaccatgttggccaggatggtctcgatctcctgaccttgtgatccacccgcctgggcctcccaaagtgctgggattataggcatgagccactgtgcctggcctaggtttttatttttaagataagcagcaacattttaagagcgcccctttctcctgtcactaaatataaataaacttagctcacctaatgaattttttattttataataaaaaattgggtaccacagggtacaaaaacatgatctttagagccacagagatcttggtttatattcttccctctcccttttttacctgcatagcctcgagctggtaccttaacctggttcgtaaaatgggatggccctggctaatctcacaagctgttgtgaggaatcaattaaattagatagattttgtaaagctcttaatacagggtcagcagtaatgctacttgttatcagtcccacagtgaaattcactgttcacagggagatggtcagcctacatatagtgtgtattcatttgcagtagagtcttagtgggatggtgcaggtgatttgtttatttgtgggggtataggatattgttaaattgttctgaaaatcaaaatgtgagttaatttctatagtaatgcttatttgcaactcattagctaaataaatctctttaattatttcatggattcccccagcttaaagcttaaagtccagtttcttaaagtgtatgaggtaaaatggaaaaaatgtaaatgtaatatgggaaatcagttctcacattgcagtagaacattgaacttctatctcaaactaattttgagattccttgcttgaagaattgttggtagagtaccaccactgtgaacattcccaaagcaggaaattgaaatatttatattgcaaggcttatctcatctataaagcaaagatggtcttccatttcccccttgcccacaggttccctttattaacgtggtagaagcaccaaagcagatgggacaatatgtttcttttcttccatgttctattcttgttcattgcagcagggcatttgtcccaattttgctgtgaaccttgagattatttttgatatgcttttcaagtgtaatgaaatatttattccatcttgtttcctccatggttttacaaaaacaacaagaagaagctaattgcctatcatatacaaagaatgaatgccaatggacaataaaatctgtaattaggaacccacatggtgatttgatatagtattgtctcatagaagtcttctatctatagttatttattccaagcctctttttctttcccatcttgaagtatgttagaagagtctattccttaaggctaagtacctacaaaaaacaggctcttataatacagtaatcaagttttctcatgctttgggagtacacagagtatgcaagtacacatctggcaccaaaccaatattttgtttccttgatctttcttcattttacctagttcagagttgcacttcaaacaaattctacttgtcatacacttgaaaaggcagctgtaggtggtaggaagttaatattttctttgaacaacatacagaggtgcagacttttactttttgtatcaggttaatgagtgaacttctctcagggaaatccaggtgaacatcaaagttgagagcaggaagcattgatttcctacaaaacacattcacctgatatcttagtcagtttgtgttgctataatagaataccccagcctggataatctgtaaagaaaaagaagtttaaaattcggctctcagttttgcaggtggggaagtccaagaacatggtgctggcatctgttgaggacttccttgctgtatcatatatggtggaaggaagaagggcaagaggagggcaaaactgagttttataacaacccacttctcacaataacaaacccactccccccataatgatactaatttactcatgaggacagagactgaatcacctcttacaggacttacccctcaacattgttgcactggggattaagtttccaacacatgctttttaggggttacattcaaaccatagcagttggttactaaattagtgctacttgtaaaaaaatacatgtttgctgcattcagaatattacatgttttcttggagtttttggaaggacttagcgtaatccttgctgttcatgacttaggttggcaagctcaaagggccttaattccccatcagttctttaaagggggataggtcttaggatattagacagcagaagtcttctttttcttcccccattatgtactgctttttggcattgtattcatgacacacacacacataaaatgtcatattttctttaaagtcaaaatatacagtttaaaatggtttcagttgctttcataagagagtaaaacttaggtgttcagtttaatattggaagaccttgttcagttaatgtgtgccttccatgaatagttggtatttgttcacatcaaatcaaatgactgtcagttctcggggtaaaaaaagaccaaccttgactcaaaaagctatattcctgcaataaatatgaacatttatgtttaatatactgctgtgattaattatttatatcctagtgggaggtcaaatattcttcagataggaaggggtatgtaataaattttttaaatatctaaaatgacaaaaatagaggaaaaacataatcatccatcctattaagtctgtattcaaaggatgaactgatgattttaaattcaaatgtttccttaatttataggtcatgagagaatgggaagaggcagaacgtcaagcaaagaacttgcctaaagctgataagaaggcagttatccaggtaaaacctgaacccatttcctaccaaacatcacatgccagcagtctttttaatgagtgtctgcaggtttacctttatctgccagcacctcacgtgtgattgttcatagtcccatgaacttcagctgttcttaatcattgtctagtaattgagttgtttaaatcctgccttatatttgctcccaattatttcaagttataattcattgccataaaactcacattgtaacttgcaatctactttttattaataatacatcttttcagtcaccacaatcttctgctgcttctccctccagcaaaaattatgagaatttgaatttttgatggaaaccagtctcaaaattaccttaagtaaaccaacagtttattatggtcaattacttgaggtactgttagtaagagagggatttttttttaatatgtaatataagagtttcaagagtgcatatatttatccaaagttattagtcaaatcagccttcagagagcctatgaaatactgattttcaatgagaaagtaggtttgatgagggttggagagtgcaagaaagtgaagtaagctataaaacgtagaattagtcaatgttggaatgactatgcagtctttaggatactttttagcactagaagaaaatggaataggatgtcttttttagaagacttgaaattgctgcttcatcctacttattcagtccccatggacatatgtgtttatgatggcagcatttccaggagaaagtggaatctttggaacaggaagcagccaacgagagacagcagctggtggagacacacatggccagagtggaagccatgctcaatgaccgccgccgcctggccctggagaactacatcaccgctctgcaggctgttcctcctcgggtaggtctcgctgcagccgagttcacacttcaggtcacagcacagacagtaagggtggggcactgggaactggaagccatacaaaaagaatgaggagaaatgccttgagcactgttattcagaggttcaacccctgtccattccatcttgaaggtcaaagggtcacagggcagctacctccacaaggtcatctctacacagcaggtactcacacttccccacagagcagccagacaggactcccagggactcacattgcaagccctgacttgatttaatattcctgaggtggtgacaattgatggcatagttcaagttcgaacacaaaagctggaaggatgtcttccagtcccttcaggctgctgtaacagaataccatagactgggtaccttatcagcaacagaagtttatttctcacagttgcagaggctgagaagtccaagatcaagacatcagcatacttggttgtctggtgaaagtttgcttcctggttcatagaacttaaattttgtttatcttttatttattttatttttgtttttgtttgtattttgctgtatcctcatatggtggaatgggcaagagagctctctgggccctcttttataagggtactaatgtcaatcttgaaggctctgccctcatgcctaattgtctcccaaagctttcaccctcaaatagcatcacactgtggcttaggtttcaacatatgaattgggggtgggagagacacaaacattcagaccatggcaaaggattttagaagtaaccttgcccagccccctcatcatgtaagtataataatataactaaggtcaaggaaagttgagatttggctgagttgtaagaatttttagtggaccagaaagaattagaactcaaatttccatctcagagcagtggccatattctctgtggggaagcatttgtcagtcatgacattagcaatgatgagacttattcatggttttcagtgatcattgccccaaaaaggcatgttgagtggtacaggcatagatgtgttcaccggcattctgtgggagagcttacttggaatggaaggaactttctgagcatgagtgtgtaacttatgtccacttgttctttttttttttttttttttttaaatgagatggagtctcactctgtcacccaggctggagtgcagtggtgcaatctcagctcactgcaacttctgtctcctgggtttaagcaattctcatgcctcagcctcccaagtacctaggattacaggtgagccacgacacccagctaatttttgtattttagtagagacagggtttcaacatgttggccaggctgatctcgaactcctgacctcaggtgatccacccacctcggcctcccacagtgctgggattacaggcgtgaaccaccatgcccagccatttgttctttctgtttgtcattgagcaagggatattgaaagctctgcctgtgattgtggaccgggccatttttctaaacagtgctatcagtttttattttgtatagtttgaggctgtgtttttaggcgtgtaaatgttccaggctgttaggccctccttgagcctcttcttatgaaatgatctttttatcctttgtaatgttttgctccaaaatctactttaatattaataaagctattccagctttcttttgattaatattaatgtggtgcatttttccatccttatactcttattgaccttgtttgtctttatatttgaagtgtattttttgtaggcagcatgtaattgggtcttgcgttttcctttggattgggaagaccatgtacactgaatgaggttatggatatggttgtcactgaatctgtcatcttgatatttgtttgctatttgtccagtctgttccttgttcttcttttttcctcttttttttttggattaattagaaattttttatgattctattttatctcttttgttggtttgtaagttacaactagtttgttattttactggtttatctcctttgtgggtttataagttataactagtttgttattttactggttgctttaggcttatagaaaacattctaaacttgtcacgatgatgttatgtcagttcaaatgatattataccactccacagacagtactttacaaaagtacttccatttttcatctctctctctctctgtaagcggttgttgtcatactttttccttactacattgttgatgtttttctttaaacagttattttttaatgagttgtaaatttaaaaaaaaaacaacatgtttacccatgaagtcatcattttgggtgctgtaaactctttgcgcagatccagctggtatcattttccttctgcctgagagatttcctttaaaatgtcttagagactgggcttggtggcttgtacctgcaatcccagcaactcaggaggttgagataggagatcacttgaacccaggagttcgagactgcagtgagctgtgattgcatgactgtactcccatctgggtgacaaagggcatcctgtctctttaaaaaaaaaagtttgagtgcacataagttggtgatgaaatctttgtttggctttgaccaaaaatgtcccttttatacctttggttttgaaaaatatttttgctgggtaaaaaatactggattgaggtttctctttcactgcctgaaagatgatactctgctgtcttatttgtgttgatatctttatctttatttctctaaaaataacatgtcttttttttctgtttttacagttttctctatatcactggtttttaacaatttaattttgatatgccatggtatcattcagtctgcccttaattccatctggccgtttttcatcttatcacctcacatactgtagttgttgtatatagaaatttaacctgggctacccccaacacccataatatcgtctgtatcttaacttttgaacctatggaatacagttattatatgaaaactgtttaaatatccatgtttgctaattctaacatctctgtcaactttgaatcaattttgattgcttattattacatgtggcatttccctgtatcattttatgcctcataattttttattaaatgtcggacgctgaatttaaacctgttgaatgctaggtgtttttgtaatattcttgagcttttttctgtcacatagttgagttacttggaaacagtttgatccttttgagctttgcatttttagatttgttaggtgggatagaagcagttatcagcctaggactagttattccttactagtgaggcaagacccttctcagtcatctaccatgaatgttaagttttctcacctgactcgtgggaagaggcattattcctgtccctgtgtgaacaccaagcactgttaatgctaattctttttggtgattttccccctggcttcagtttctttcacatgcatgtacccatcattactcagctatattctcagggatcactctgcacatctctggattctcttttggagcaactctctcctcaccaataccctgtcctgtgaattacaactaccttgatctctccacacacttcatgtcctccactccacgagtcctctaggctctgtgtgggtttccccacctgaaaccatgacctggaaattcagggccatgagtttggcagctgtaagtcctcatttgtttccccttttcaggaatcagtgtccttcacctgatgtctaatgtcttgcagaaatgttgtttatgccaggtgtggtggctcacgcctgtaatcccagcactttgggaggccaaggcgggcggatcacgaggtcaagagatcaagaccatcctggccaacatggtgaaccccgtctctactaaaaatacaaaaaattagccaggtgtggtggcgcacacctgtagtcccagctactcaggaggctgaggcaggagaatcacctgaacctgggaggcagaggttgcagtgagccgagattgtgccactgcactccagtgtggtgacagagcaagactccatctcaaaaaaaaaaaagaaacgctgtttgtatatgaatatattgtccagttattggtggttcaggcaggagggtaaatccagttcttctcactcaatcttggctggaattgtttgtgcattttatgcaacttaaccagaaagtcacccatttgcaccgattttcctcaccattttgatttttctttctatggataaagttacagtgcacagaaagccatgaggagccgttaaagagctcgtggcattcttccaagacgtaagatactatttaccctgttctaccgatgatatcactgcaacctcgggagatggagcggctggttcagggtgacactgctgggaagggagagggtagagccgcgagtcactgtggtgccttctcactagaacgagcttcctctctaaacaaagagcttttgaaaaagaatattcatattagcgttttcattttctatttgccaaaattctctatcttagcaaggcacttgtcaggaaatttttttttatatctctgcagaacaaaagttccttggttcctctcttttttggagaacacgctttcaggagaggagccgtgtgatcatttgccagagaaggataggctggtgggtgctgagaccagaatctttatagcagaaacttgtgaagcgttccagctgaaagtccaatctctaaagtaagatctttgctaaatggacattgatgggactaaaaataagctgagggctgaatggaggctttaacaaatgtacatttaaactctcagtttagtctcatcagccatcacaggaaaggcagtggcaagaatgtttgccgaagtgtcatcttttatcaaaggggataattttagagtggttgtaatcgtgcttattgtgggcctccgcattgcttcatatggaattaggcaacatgttcatttgaaaaaaaaattaaaaactggattaggaagaaatattttactgtcaaaaatcagatcactgttgttgattgatctaaggattcctgttaaattcttaactcggatttatttatttatttatttattttctctctctctctctctttctctgtttctctttctctcctgccttccttccttccctccctccctccttccttcttcccttcctttcctttcctttccttttctcttcccctcccctcttctcttctctaatcttctcttttcttttctcttttcttttcttttcttttgttttcttttcttttcttttcagggtcttgctctttcacccaggctggcatgcagtggtccagtcgtagctcactgcagccccaacctcctgggctcaagcaatccttttgcctcagcctcatgagagttgggtctacagaagctccaccatgtgtggctaatttttaaaaaatttttgtaaagacagggtctcgctgtgttacccaggctagtcttgaacttctggcctcaagcgatcctttcacctcggctttttaaagtgctgatattacaggcatgagccaccatgactcacctttaaatctttcctttgtaataaaatgtggctgggtggtcacaggcctggagtctagggggcattacttgccatttttgttaagttaccatctttaggtgttcatttaagttttaatgttgtatggcttgacctggcacttaggtctgcactttggcaggcacaagaaaattgtaaataccttcttttttttttttttttttttttttttgagacagagtcttgctttgtcgcccaggctggagtgcagtggcgtgatcttggctcactgcaagctccgccttctgggttcacaccattctccagcctcagcctctcaagtagctgggactacaggcacccgccaccatgcctggctaatgtttttttttttttgtatttttagtagagacgggctttcaccgtgttagccaggttggtctggatctcctgacctcgtgatccgccagcctccgcctcccaaagtgctgagattgcaggcgtaattaaatgccttcttgaggacttttataccttcctcttgaagacataaatccagagcttactggtggttgtctgaaaaagatcacatcttgtaataggagtcatacataaatatttctgagatctccctcatacttaaccaccgtgcctggaaaatgcagacaactgtattcagtaaatggtatttgaatataagtaaatcaaaagtgtcgtttccatagattctgtagatgttaccacttagaataattacctgtctaacccttaacaaattctaccgtatattctcagactttgcaaacacgggattccaaaacaatgtggattgttttcagtttctttgaagctcagatttaaatcatacttttactcagtttttaaacctaaacgtggaagtgttatgagatgttgtttttgtgcagctagaattccttgttctactaatgaatttcatttcctgagtccctgtgtctgagtatactgtatgtttcaaatttctgatttagttatgtacctataggcaaatacactgaatggtcaacctaaaaatgcattgtttgactcatatttagagtcatacatatataggcacatgtatttaaaataaatactttaggctagatgtggtggctcacagctgtaatcccagcattttgggaggctgaggtgggaggatcccttgagcccaggaatttgagaccaccctaggcaacatagaaaggccctatctctacaaaaaaaaaaaaaaaaaaagatttttttaattagccaggcatgatggtgcgcgcctgtagtcgcagctactctggaggctgaggtgtgagtgtgaaccaggaagtcaaggctgcagtgagctgtgatggtgccactgcactccagcctggatgacaaagcaagacgctgttccaaaattaaaagttaaaaaatgagataaatacttgaaatattacaattattaaaatagttgttttccccatgggaaaaaaaagttgagcagagctgtgtctttgcactcagaaaaaactcttactctgttgaaggctagtgactcttctaaacaccaaccccttcacctttttactttccttagactttctttggaaaatcaaggagttagcactttttccccctggaagaattaaatgcctctccagaactgcagcacaggaggttaacttctaccacctttggaggcctgcaagctaccagattaaatacttaaagctaagcattcatcatttcttaacctgccctctacagtcatgcacttcctgctttttactttgtcagggctcgtactcaaactattcatagcttcatgaaacaggaactaaatgctgtctgagcctttccccttgtaactctcagcgttctgcttatccttcatagacagaagatgatgatatgtcctgactgttgaagagaaattagacttaatgtgatcctgtacagttaaaccaaaggccagatagggattttttatttcaatcaactttctattgtaggcctaggtttggaaaaccttagcaccccctaatttgtaagacttgaactgttttaaagataagggatacacagccaaagctttctttgtaattctgagatttttggtgtttttacagatacttagtctaaatctttcatcagacagttatcatgattattattctgacttcaacaactgcattttctaaagggaagtgagaattaggaaacattttcctgtacatctgtttatctatcccagttgtgttgtttggattttttcagtgtcttaacgattgaaaccatcttatccatactgaaattcatttcatgcttctatctgctgcttcacattcaggctatcagtttaattgagcaaaaaaaaaatgttggcagtttctatagcatcggcatccttctttggtttctcatttttgaatggttcagccacatgttaaattttgctgagatctctggaaacttcttcacataattctttgatagaacatgaattctgtgagactcttcattaaagagcacggtttcatcactaagttgagattttgctcaaggctatttggtaaattccagcagaagagcaataaatgttcaacaagaaacagccgtcattggagataacaagggtagacattaatgggaggtttgtcacaggtaaacaggtgatggcatgagaaggtttaaaccacctcataaataaatttttcgccactatatgatgtggattacaactaaaccaaactttaaccaatgtgggtgttggtgtacctttcttttctaaagcaaaaaagaaattgtggtactaaacttgagcttttatatgataccgctaattgcccttcacccaacaaaccaattatttctacccatcacttttcgttgcaaaagaaattatcttataaaatatatgtatatagcatatatctccaaagcaaatatgggacatctgtacctcaatgtaactgatagtaagttaaaaattatttgctgagttcttggtatgtggacagatgaatattataatgtttaaggcattccaccagcaggttttgaatttaaccaaaattttatgaagctaatcagaatggaattaaaagttgaaagactgccaggccaaaaagatcatctttcagaaaagtaaataattgctctatacttacatatttattatttatttgttcaccatccgtttatttttagttgagttctgtatacattggtgagcaaagggggactcattagcttgggcactcctaagggcaaacccaataacagatagtgaatgggaaggaaaatgagagaattagcatttagtgaacaaaatcttataaactatgctgaatggtatacatgctctttcagtaaagccactcagtactattacttccctaccttctgaatgtttaccaagttcgataaaatcttgctacatacaaatgggaagtatgtaacaagagatactagtggtttctgggtttaattaagttacatagaacattaagaagtatgttgggaaggcattagcttaaaagctgtcttttgccactgaggccatattcatcacccagattccctccacagtggagcactgctcagtcactgccttcagaatgcaaataggtcttcacaggatgctattaaaacccatagcaccgtatggttttacgctctgctttcttccagcaaacctacgtattttaatgttaatatatatgttcattttatctttgagaatgaaaatgtattatgaaaatataaatatttagtttttgtagacaaatagcacatttaaagatccagtagttattcacctgcctggtatgactgatagagaacagatgggtagcaaagaatcctcaccctggaaacatgtacgcatacacacgcaaacacaatctcgcataagctttaaggggttcattcattttgtgaaggttgaccatggataccagtttaaagatgccaggtgatgtttggcttttaagtatcatcaccttgagtttccttatataaatgttttaatatcaacaaaaaactcagaatttctaataggtcataacactgcctaggtatgggaagaggagagggtaaaattaaaagaaatgcaaatgtacttttctttgaataggctaaccagttagaggatgtatgaagcaggaccaccatagtccaagtatgaatatgcaaaattaaagcagattgctgtaaatctctcttaaaaagtcaagaatatgtcacagttggcatttttcggatgatcagaccgtttgacaaatctctgcaagggtccgagttagtcgaacatatcttttgcttatgatttcagcaacactgtgcgctttgccttctgggttgtattactaattctgttcatcattaagtgtacacatgtttcactgtttgactaaacaaagcttgaagacatacaagtccaaacattttctgtcctttctgtattcccaggtcagaagatcttagctctttatccattctgtgctagagtttgtctgaaagcatgaatcatggggttgtgttgggtgctaaatttcagttctatatgctgccttcactaatttatgactgtggtctgaacaaccaaaataaattatttctgagaactagcaaaataccctggaaaaaatttatgaaacctaccagatttgtaaaaaggtcagccaggcgtggtggctcatgcctgtaatcccagcactttgggaggccaaggcgggtggatcacctgaggtcgggagttcaagaccagccggaccaacatggagaaaccctgtctctactaaaaatacaaaattagctgggcatggtggcgcatgcctgtaatcccagctactcgggaggctgaggcaggagaatcgcttgaacccgggttgcagtgaggggagatcaccccattgtactccagcctgtataacaagagtgaaactccgtctcagaaaaaaaaaaaaaaaaaagaaaagaaaaaaggtcactaagtgatgagagaattaaaaccactcctattttctaccttttataacataaactcttgtctttacttcccaggtttgccatctttataacctgtaactaggagcaagtgatttaataaagggattcctcctattccgtctgcaaattggagttaatttttctcctctttctgcaatttctgttgttttagcttttgttagccataattagaaaatcaaaaggattcattgaaagttgagacaaaattgtgaagtaggaagatgtcttcctccgtaagaggagaaagattgttagaggaagtacatggaggctttggtgacacatccctatgaggaagtgatctgcttccacgggaaggagagaacagatgatagatgactcctagatgctcctgcgtcatgttcagtacaaaatcagagccgcatcagcaaaccggataccctgggaaggaacattgggataactccttggccataaacaaaagttttgctctggccttatgactaagtggattaatagagattagttgttcaatatccttccatctaatggatccatattgttaaaacttaagaaacaccaaagggggagagtgtgagaatctactgccattttctccattgcttcattcaagacttctgtgtccaccttggcatgggattatcatttgcccttttatactcaccttaaactacaaagatcatttgtttgcctttctgaagaaaggaaggtggataaattttgcaggagactttaaaaattcagctcaactcctggcattaaagacaataaaggtggtgattcagaggtccccatggcagtttccccaaatattacgtttaactaagatcatctcaagcacagagagacttaactctctaaagtgtgatttttaaacctgcacacggaaattttctacattttatatgctcaagatttcttgaaatccagggtgtaaaactgtgaaaataatagttctgaacctatttatgaaagcaggagagaattgctttgttcagttttggaaaccaccagggtgcaatttaatgctccaggagagggttttctgtgacctggaaaggttggggtgattcccgtacagtgagtcatttacttccttcttggcaggattatgcccagggcttttaaacgctcttgacacttcactgccttccataagaaacgggtttagggcacaagtgtctattatgataagatgccagatttctagatcaagcataaagctgtggagtgggacaataggacttaataattttaatacacttcccacgtgaactgtcaagtaataagctacatattcagacgtgactggcattgagtcatcctgccattagtcaaatgtatgagacttttcccaagtcccagcaacaccaaatttgagaaatcgtataaaagaaaaatgaaaaagtaaatacgtctaagaaatggggaaatcaataaaaaatgtactagcaccaggggcggtggctcacgcctgtaatcccagcactttgggaggccgaggcaggtggatcacctgaggtcaggagtttgagaccagcctatccaacatagtgaaacccttctctactaaaaatacaaaaattaggtcggtgtgagggtgcacgcctgtaatcccagctgaactcaagaggctggggcaagagaattgcttgaacccaggaggtggaggttgcagtgagttgaggtggaggtgcaccactgcactccagcctgggcgacagagtgagactccatctccaaaaccgtgttagcttttatcaggaaaggccattaaattttcttcaatattacctacatcaatttgacatcaaactataagaacacaatatgtgagatgttttgaaattaatgaaatgaatcttctctttgagacgagtttgtgcacgctatgaagtccattaaatattttctgggaagagttcccagttaaaactactttctaaagtacccaagcacactatatagatacatcaagtaggtttattaatgtcagtatttcggtgaaaattgggaaggccactattctgagtagagaggtgtttgttttctacttgaagactatgaaggatattctgcactactgggcctatttctgaaattgtatctagctgcaagttactcattaatttaattaacaaatatttattagcaaccaaattgtggcaggaactgtgcctagaggtagaaatacattacgctcttgtttccagagaggaaaatgagtaatgttctaaaatgtaaatcttatgtttctctttcctcttgctgtaaatgatgtctaagccatttcggtggtgcctgttcttaatcctttaataaattattttgaatgattttttaaaaggcagtgtgattgtgaggtgagtttagtacaaattaaaaaatgtcacatcagttgcaaacagacagcacataattatgagctaaacactgtttcagaaacagtagtgacaataaataggattcggtataattagtcctcctgggacagatctcttcctctgttctttgccatatattttaataatgagattagccatctaatgccaatataaccagactgtagtattaatacacagaaaaattattgctagtaacagaagatttaaagacatgagggtgatccggattatatgcctgcaggttaaaaaaaaaaaatgtttcttaaactctctttatcaatatccttttcgtgagccactgaattcttttgtttttctgatcatatgaataacccgtcttaagtatgaatattgtgacaatagtaatagcaattactttaagagaatatgtttctatagagataacagaggggtttttccctaccattcctgtatgaaggtttctgtgtttttaattaaaattttaagaaattcatctttgtcttagcataataaaataaacctcactagacaatcaggacaccttgttattcttagatacattattatagctcaagaaataacaaatgttaagcctggaggatttgtattttggccaaaagttgtgagggcaattatttatttatttgagtgaaatatgcaggaatcatatatcaaaaggagggaggtcttttttttaacctcaacaaaaatataaaagtatagggaactgttatctatgtgaacccagcaaatctgagacaggtctcagttaatttagaaagtttattttgccctggttgaggatgcacctgtgacacggcctcaggaagtcctgatgacatgtgcccaaagtggttggggcacagcttagtgttatgcatttttagggagacatgaggcatcagtcaatacatataagaagtacattggtttggtctggaaaggcgagacagcttgaaacaaaaagcaggaagactcgaagtggggaggggccttctaggtcagagataggtgagatgaacagttgcattcttttgagtttctgattagcctctccagggtagacaatcagggtgattggctctaagcagttcccagctagacttttccctttagcttagtgatttgggggccccaagaattattttctttttacacctgtgttttttctttcttaactaaaaatagtatttgtttctgagggatagagataactaccattttatttggtatgatttatttgcctaccgtccaacaaagaaggtaatctgattttgttttcatttccaagcatgattcctagagatgtgtttaggtggccaaatcaatgaagcagaaccctgcaaattcatttattgggagatatcctaaggtcttcctgaattatctgatgttcccaggctttgcttatccaataggcattaggaagaaaaggcttgtgtttatgtagatgcacacaaaatgcgcatctcagcttacataaacagtgaaggggtttcccaggtctcattatccctggaggagctgaggcctggggagtcctcagagcctcctttgctactctgttattgtggcaggccaaatctcactaatgcaggcctccgtaacagctgtttccgtactgactgagtggttcagttaaatactaaaagctaaaaaaaagccagcgcccttatacagaggctggaatgtaacaaaagcccaccaagagttttgcctaggcctttcctggcaaaaccaaggaattcttaacaggacccatttaggattaacaagttttactgggagtctgaagaaactctacaggcctccaagaacaagtttactggaggtctgcaggaactcctcaaacctccctgatttagcaggagacaagataagagtaatcaccccagcacctagacccatttagattaagtaaatttactgagactccagaggaaggtcttcaggactcagaccttagttatggattaaagaagttaatcacttctgtcatgagatgaatgcacacttacacgtagacatacagcttagaaggcatataagttctggaaactttgtaattttgagttggtctggcactaatttccaggccatctccctgtaaaaggttacaaaaataaaaactctcttcctcccagttcatctgcatctcgttattgggctgtgaggtatagtagcccaaccctcagttcagtccgggaacattattatcaaactctggggattttcaggataagttaggaatatattttgaaggagaatggcagtattaaatgagatcagcaattgaaaacatgtgaatacattcaccatttaattacccatctcaatagaagataaggatgaatttagcactagaaaccatgaatgtcacaaaagcctaactttaataccttgaatcactttccagtaatcctaatcctttatccacatggatagaggacattcctatcttgctctttcttctccccacacattagcttaataattagctaaataatttcatgcattagctaaggaataatggaactccagaaacctaggacagtaattgagagactgaacaagctaaatctgaaccttctgcacaattaaaggagctgatgttagcatggcccacagaatattacctgcacttgtaaaaactagaaagtcaggcaagtactcctggaacagactgtcttttctaaccatgcacttatttctttgtttttaactttgtttttgtttgtttgtttttgagacggagtctcgtcctgtcgcccaggctgtagtgcagtggtggaatctcaggtcactgcaagctccgcctcccaggttcaaacaattctcctgcctcagcctcccgagtagctgggactacaggcgcccaccaccatgccttgctaatttttgtatttttagtagagatggggtttcaccatgttggccaggctggtctggaactcctgacctcgtgacctgcccgcctcggcctcccaaagtgctgggattacaggcgtgagccacggcgcctggcctgtttttaacttcgtaagttgctttgtagaactatcttaaacttggtctattttagattctccttgaagggccagatcacaaagtgattaggagaaggaggctctggagccaagacagtgagactaacccattcttcaaatctaacactaactagctgtgtaaccattgggccagggatgtagcctatgtaaccacaatctcctttgtgcttcatgcctcaccaataaggtggggagagctgctatgactctgtcatagggctgagacgaagatttgatgagttaccagcaaaaagcatttaatatactgtctcattcagaagcagtcaatacacattgaactcttattacttagaggaaagaaaggggtcgatgatttatagataaggcctgagtgaaagaaataaatgtgtattgagtatcagcaatggactacgcatcattctgggtaactatcactgaacacatttaatctgcaaatactatctgaaagatactgccatctgaattgcataggtgggaaaagtcaaggcttttgtgcttatttttaaatgtatgttaacatgaataattaattggccgtgcactggtcgcacgcctgtaatcctagcactttgggaggccaaggcgggcagatcacgaggtcaggagatggagaccatcctggctaacatggcgaaaccccgtctctactaaaaatacaaaaaaattagctgagcatggtggcacgtgcctgtagtcccagctactcaggagactgaggcaggagaatcacttgaacccaggaggcggaggttgcagtgagccaagatcacgccactgcactccagcctgggagacagggcgagattccatctcaaagaataataataataataattagtgggaatatatgctgtttgttgtgataggagaagaaaaggggagatccagatgttggtcatcagaaatgacctgcatcttctctaaattgaaatttagcttgaagtagtaatgccaaggccagcctggggccatggcatcctggtgtacctgcttgttggtgacagtccttttaggacaaaatatcttacaaaaacattcatagatgactaactggaaaaaaagaagttatgatgaaaagcaattcttactgtttttgttttttgttttttgttttttttaattaaaagacaggcagttattctctttcccaggcttgagtacagtcgtgcaatcagggctcactacagcctcaacctcctgggttcaaataatcctcctgaccaagcttcccaagtagctggaactgcaggcatgtgtcactgcacctagctaatttttaaaattttcttgtagagacaggttcttgtaatgttgtccaggctggtctcaaactcttggctgcaagtgatcctcctgcctcagactcccaaagcaatccttacttttttaattgaagtgctttttttttttcttatttaaactcttaaaaattcatcccattttcttcaaaacaataaatcctttacaagggagaaaaatgaaatagagcaactaagaaagcatccatgaaggccaggaaggaacatcatggttaaatgcgattagtcacagccccttctgtctccagtcttggatgaataatggtaacagaactagagagatttctaagaccttggtgcttaataacaagcaagcatcgagggtggttgtgcaagatcctgatcacacaactctgcatatcaaatatccttcacaatcaacaagagtcagcctttaatctctgatgttttcaaatgttctttttttttaattcacatgtataacctatcctcttttcaatatatagagatatagcttatcagtcattacctcttttactacttttcttctgagatttaaaaggtcatcctctgatttgtaaattcaaccagatttcacagttcagatgagagttgtaataagttgccaagaactgttgcaagctgtgatggctgtctttctggggattatagagaagcacatttcttttaggaaaaaagaaggcagatgagcccaagttgttttatttttattgtgtatatgtatttgttttctcaagtacagtagcatggcctctgtggcaggcattcaccaagcaaatacagagcaccctctgggtcaagcactgtgttattggggttccaaataaagaaaaaagaccaaatccagccctgtggatctcacattaaagaggggagtaagaatcatagataatttaatgagttaggtacattaatggggatttgcacagtatttcataggagcacagaaaaagggtacctcgttccacctgagatggcagggagatggctcctaagttaactaagcaaaaggggaaggagaggcacatcccataggatatggataacacaacaaaagctccattaccacccgccccaccaccacacacaccatctctggaataaattttgtaccttccaactggttttcagggtactcatgacacatgggttaataatagctaggtttgcccaaatgaccaaaattctattcccaacatgaattttcacaactggtttttttgtttgtttgttttaatgaagaagaaatgttgtgtttttggaaatcatcttacaaaatcatgtagtggaatgcatatagtgatgaaattgttgaagaccagggaatctttgtccttagtttttattaggatggatgttttcaggtaaaactaaaataaaaatgaaatggaaccaattagaaagaaaataggagcacttaagacgaaatgtaattgttgctgaaagaattagaatctgatagcttagaaagaacttaattaaatttcagagtaaaataaatacagtttagcaatggcctttctcctagaaaaatataatgtctcttacagttcagttactccttggcttacaaaatagtggttaaatttcctgtttttctcattttgatttcgtatgttacatgttactggtgatgggattatctgtgtgacattacctctggtcttcaaaatgtacacgtagcaatgtagtctcacatatgccccttgggtgcgaaaagagaaggacctaacttaacctgacagacctcaaatctgttctctttctatagcagagtactcctatttaaaaagaaaatgttgagtaaggaggacagtcatcatatatgtcgagaatgttaaatgctcttgtggaagtgaaaagcagccgatctaagtaattacccattaagaaaggagtaggagaaatgtttagaaggcagacctgcaaaaaggtgactcacagtacgttcacatgaccggatgcattagtggaacctctaacccatcgccaatggaagaagcagtgttttgcacaaacttgaaaaagagtttttcattttcctcccacagcctcgtcacgtgttcaatatgctaaagaagtatgtccgcgcagaacagaaggacagacagcacaccctaaagcatttcgagcatgtgcgcatggtggatcccaagaaagccgctcagatccggtcccaggtaagcgtggggtataatcatcttctgcagctttgacaatccaggattcttgcttcttgggttggtgacaggatcccacgcattctccgagcacctataggtgttttccctatggcaagagctctttaacttctggtaaattctaaaagcttgtcttagagcaatatgtggtttggcattttctgagttatgaaaataacaaatgtaaaaatcttagtctactgctaactgattgctaaggaactgattaaaaccaatgactaaaatgagaaaaacaaaagttgtataaactaaaatcttgaaaactggttcaactgaagtatggcaggcaatcataaacctactggaatgttgagatttcatgtgagcctaaatgaagcccagtaataatgtattttatactccccggttcccaaaggctgaaaactgggatctaccttaggaaatgtgaaattttacattttcttgaatgaaagagttaaatatatatagcatgaaatagccaatcaaattgaaatacgttgttttctagggggaaatttgcaaagaaatgtatttaggcatgagggtcctgttaagagagcctcagtattaggaatcagaggtggcagaggtagcctttttaattggctgttataagcatacaagataatggtaagtttcaagatcaagtcttaaacctgagctcaaaaagttagagaacagaaataggagaacaagaaaaataaagttgccctttcagttcaacctttttaacagtagcagtgttttgtcagttttcttttggaagtttgtatctacctgcagtgcttggtaagaaaaataacctgggcgacagagcgagactccgtctcaaaaaaaaaagaaaaaaagaaagaaaaagaaccattcctacccccagacattgttgacctggagttgtcatcctttgatgcaggttatgacacacctccgtgtgatttatgagcgcatgaatcagtctctctccctgctctacaacgtgcctgcagtggccgaggagattcaggatgaagttggtaagtaagctgttcttttgatgctgcacatggacatgtattttcccccagaggaaaattgaggaagtgagttatctgtttgaggaatatggaagttaatagaacagcttgccttttacgatgaaactgtcaggctggaactagcttactagccttagcaattgaatcagttcttacctctccatacttgtaagactggaggaatgtcgcctgacttagggtatagttttgtaataattggacacttgttattgaattatacgtggcagcattttttctaatttgcccaatcttgttatggctctcaaattatgatgctttggtactttacaattaatggggaaaaaaactcattcttcatcttttgagtgtcacgattgttccatcttacaaatgaaaaagctcaaacttaaaatttgagtaacttactggcctgtgtcacatgcattataagtagcacagccaaaacacataactgtgacttgtgactttgaggttattgttatattcagtaagtcacaattctctttgatggctgagcagggaagccatgagtgttctctgaaccacatcattgtttaaacttaaaagatagtgggctattaaacttatattctgaaataattgtactctcacaagaacttggaaaaatagtacagagaggtctcatgcatccatcacccacatgcctcaccagtgacatcttacgtaactatagtccattatcaaaaccaggaaactgaccttgtgtgcccactgtcttttatgtccctagttttcctaatgactaatgatttcatttaagatctctcatttctgtttctcttggaaagagaatcaaataccacatgagtctctgtcagctgccaaaatgcccataactgtttaacttacttcacaaaggtacatagatgacgattatgttggtgcatctttcaatataagcatatgtacctatactggagatttagtgtgtagtctaccaacatataagcaatatgtatctggcatatccttccccataaagaatcctaccctttgttaattgggttggaaatagatacaggttatcatctggaatcagagcacccaggatgttgtagatggatgtacccattacagtaagtccgactttgaagtgcctgaaacaccgctcaagggaacagctggccctcactttttcccattttatgccagtgttattctgctcattctttcctgatttatgtggccttgtaaatattgtttgtattgctgtgaaatatttggcatgtgtcaagtgatgatgttctgttcagtactgcacattaatggacggaatctgaaattatactttgagctacataacttgcagaagaaacttcatatgtcagggaggtgcagtgtcccagaactttgggaggccaaggtgagcagatcacctgaggccaggagttcgaaaccagcctggccaacatggtgaaaccccctctctaatttaaaaaagaagagaaaaaaagcaacttcatagtgtgccaagcttttgttcagaaggagcaactcagtgttgagcaagaatttatgaagatagtggaggtggagtttttagtctacaccatgaattgagaacagagatctccaattaatttttcactgtatcaagtttctttagcaaacaaatatacttttcaggtatacttggagaatagacatcagtaaggaacctttaaaatactatgtattaaataagtgtaaagaagttctccaaaaagttgtagaaggtacaaaatgaaataatttatcagtcttaatgaactgaagctaaaatcttctagaaaacatggtttgtttgtttgtttgtttgttttttacagctatcttaagcctgttttcacatgtgacttcagttgaagtggcataggtaataactatagggaaataagccattacaaaggactaaaaagttgatgaccaatattccaccctcacccagcaattattgttgactctttataattaaattattagaactttttatttggcactatactactgaaaacattagccactaattagtcacacttccacagaacagatggtggttcagatatcttgaatattacgaaatgcccaagaatagggcagcacaataaacttcaaatctcagtaccagggaggatatttagataactagtatcatggaatctttttctgtaaaaagaaaaaaaaaaacagccattaggttggattaagaacatattagggggtgcagcacaccaacatggcacatgtatacatatgtaacagacctgcacgttgtgcacatgtaccctcaaacttaaagtataataaaaataaagaacatattacgtatgtgctcttaatgtgtgtgtgtgtgtgtgtgtgtgtgtgtgtgtgtatgtatgtaatatgctctcaatccacccattagttgggtttttttaagtaatgacatatatatcattctaaatataccagatgccacattctgaaagataatcttttttaaaaacctttcatttggaatcctgggtgcttccatttttaaatgactgttctctatagaaagagaagtttgcaataacgaaccctgtacactatctgagctgctagtgtcaaagctacagaagtggtttgctggggagaatagcttttctgggttgaacctagttgtcatctatagtcctttttcatttgaaggaacatttaaaacaatacgtccctttttagtaggaatatagttgaaacttcaagattggccaggggtgctaattgcttaagccaaatgttattagaggttcctcatgttattctttttacttttgtatgtgtttaaaatttctcataataaaaagtgttgcttttagcttactttctaaataggttcttcatagattttttttccaggttatgtcttgtagtcgttctaatattctctgattaaatgctttgtcattagtctgagttgcatttatttgctatttctgtatataatcaaattttagatttggagtcagttcagtacaaatagcatactaaaattcagagacactggcaaaaggagaaaattttaaagtccctaaaaatgcatgccttttgtatagaagtttgtgcttataaatacaagcaattaggatgtgcttaatgcagtcaaacatctgtagagagatacaatggtttaattaaataatggtaacagttgctttatggataagaggttttcaccagtctggggaactgccagtatctttagtgggagaggtatatctgcttcagtaaattatgcttccaattagaattctcttttatgggtgaaaatgaggaagaatggagtcatgctgagaagaaggaatgctatcggtgaaggggaaaattgacattaaatttgtgagcagtaaactgtgaccagagcatagggttcatcatgcttgtgagttctggccctggccttgtatcttccattgtgcttccctgaggcatcctgtctgttcatgctactttcccactaacttcagtgaatcccaaattcatgggtctagccacagccagcgtactgaatcccagtgccatattccagaccccaaatatcccatgtgcctctgaacctgcaatcaatgtgtataacactcatgtccttctggaaatttacttgttttacacactctattctgagttctcttggttggcctaaactatccatgatgccttcctctccctcacccattatttcttattagttgcaagttctgtatatttggccttctgtgttcatgtgaaatctctgcacatcccctacttacctgagatcctgtcctctcatcagtgtcattagactcccagccagtcaccctacctcttatctcacattggccccctcccacttcaattcctccttttcggaactatgcaagttcccttaaaaacaaaagacaaaacaaaaaaaacagctgcaggccggcggcagtggatcacctgaggtcaggagttcaagaccagcgtggccaacatggtgaaaccccatctctactaaaaatagaaagattagccaggcatggtggcaggcacctgtaattcccagttactcaggaggctgaggcaggagaatcacttgaactcgggaggcagaggttgcagtgagccaagattgcactattgcactccagcctgggcgtcaagagcaaaactccgtctccaaaaaaaaaaaaaaagaaaaaaaaaaagctgcttgtggtttttccttgcttgaaaagttgcacctttcaagattcaagtaaaatgcccaagtcctataaaccctttctaatttgcatagagaacggagaaaagagctggcatttgagtgacaaccatgtaaccaactaatgagtgcctctttgtgataatgctgatggtcacattctttctttatgaatgttccccgttgaggtacaggaccgccatatagagatgtggcagtggcaggtggtttagggtaagagtggagactgataattttattctacatcccactcaaggagccaagccctctggcattgtgcacacccactggaagtgggctgttcttgcatttcacacaaaggcagcatatgggctagtgaagatactcggaaattcagtgatagcatccccagtttacagttgaagaaattgaactttgaacctaagagagtttgccaacttgcccagcccagatagtaaagtgatgaaagtggggtggaagccaagacctgccagaagtccaaaatctgtgttctttctgctgcctattttcctctctgaagtggaattttcccctacttaacctcaatgtgaaagcactgggtatccacctccaataccatactctaacttggagtaaattatttgtttatatctctactaaccctccatcctgtgaactcttccagatatatgttggtcatccttgcctcctcaagatccagcaaggaccctggtactttttagatattagtaattataaatataaggttgaagccagtccccaggataaaaaggcagatgctccttaacttggactgatgaagtgggctcctccgtaaccctaaagacctgaccaaaactccttccttgacatctagcgtaagcaccacacaaaacaaatttctttcctaggccacagcatcctctaaagctgtgattgatcaagctaactaaatggatgtggttggccaagataacaaagcataaatcagggttctgaggacctttattaataaaattttacaacatggtccttctttgtaccatgaccctctgctatttggtcatctacttgatttaattgtgctgtcctgtttgaccgccaaccacagtctgaagctattcccatgacaaataagtgtgaattttcaagtgtcctgttgtgttataaaaggcccgtgttttattttataatttcatatttttttcattcaattttaattattatgtgcaagttcccaggctcagtcatttattaatgtttttattttttaaaaagttattttcaggcagattatgaagatttcttgcaaagaatggcctcaggcattgtttgtatagagataaaatctcctcttttaaatcactatgtaggtcttcattaatattttttcattcaacaaacgatggaatcattatttcagtgaaactatggctcctcttcagtgttcatattctgctttaattatttattaatccttcaaaagggcagaatcccttcatcctttcaacctttgctttgtcaaattgttacttaaaaatgatggtgttttctttgtcctttgtaatcttccttaaatctctgctaaaaggattctattctactctttgtattggcactgaggttatttatcaaagtgtgcttctctttgcagctacctcaaggctaaaaatgtagctcttttcagagatggctgttttacagaatgctataataaccaatttatgagaaaggcagtaggaaataaagagggaacaaaggcataattgtttcatacccattttttttcttctagcattcaaaattaataaaaacatgaattattataaaccagatgcgggaaagatctctggctgaataaatccatagtgaatggggcaggattgaaagatatggcggggaatcaagaaattcgcaataatgaaaggatgcttattttttattacaattttactgtggcctcttgataaaatgttccactcttcaggaaaaatgcagcatggttatttcaaagacagtgtttccatattctgtttctaataagcctgttgatttgggggtttagtgggtccaaagtagactaggtttaaaatagaatatttatagcacttcccagcccaacaaaatagaaatttaatgttattgagaatttcaagtatccttatgtgtaattgttagtcaaggatgaacatcaaaaaaaaaaaatcataacagcaaatagagagctgtcactttgttcttataagaacataggtgtgactttgtttttcataagaaatgacttttaaatgtatatagatttaatggtttacagctgacttaagtatttggacataagaactttttttttttttttttttttgagatggagtcttgctcagtcacccaggctggagtgcagtggcgtgatctcggctcactgcaacctccgcctcccgggttcaagtgattctcctgcctcagcctcccaagtagctgagactacagacgtgtgccaccacacctggctaatttttttgtatttttagtagagacagggtttcaccatgttggccaagctggtctcgaactcctgatctcaggtggtctgcccatcttggccccccaaaatgctgggaatacaggcgtgagcccccacatctggccaagaacatttatacatattatcaacaaccaaagccttgttcccccattggtttcataatagtctcagagctccttattcatattttccctagtgttattaagtaacagacatgaggcctgtaagtttagctgcctgtgtctaaatgtatatctttgacccaagacaatttctctttcaaaatagaaccactcatttataaatgaaaatgctttgtcaaatgaatggcaaagtacggtatactattaagacagcctcctagttttctgacatttggactgccatgttgaaatgtctccacacagcaagatacaaatgtgtgaatgccagtacacttcataccttaggtccccaactggtctgtctgcagacttgaggttacagacctgcaggtgtcgaactcaccccatagtggtggttagtagagtgctttgtatacgtttagctctctatgccttttttggttgtgatattaggtaagctctctttttcttgctttggagcttaattatggaatctgtaaatatagtgcatatgtcatccagatgatctgtggaagtcattgataatgacctttaaaaattcacatgtaatacagcatccgttttcctgaatgatttttatagttttaccattggcaaacagatactttcttttatgtatttctactccataattttaggaaaaagtaaatccttttagctacattaaaaagaatacactttctaggaataatgaatgtaaaaaaagtttccttttttaaaaaaatattgcgctctctaccattctggcagacaaattgttgaccttaatatgtataattcagtgcagtatattgatcttgtttattgtgctccaaatggacgctggcagaaatttgaggaattaaatatcaaccacagtgttttcttcatgcgattgcaatggtttgttatggattattttgttcagttcaaataaatgatgtacgttcagattctttgcccaattttttaattgggttgtttaccttactttcttaattttatttttatttttatttttatttttatttttggagacagagtcccgctctgtcacccgggctgaagtgaagcggcatgatctcagttcactgcaacctccgccttacggattcaagcgattctcgtgcctcagcctccccagtagttgggattacaggcacatgccaccacatccagctaatttttgtatttttagtagagacagggttttaccatgtttcccaggctggtctcaaactcctgagctcaggcaacctgcccacctcggccttccaaagtgctaggattacaggcgtgagccactgcactcggcctgctgttattattgagttgtaagaatttttatatattctggatactattaaattcttatcaaatacattatttggaaatattttacccattctgtaggttgtattttcacttccttaataggatccttttgacacacaaaaattttcaatttagaagtctattttatcagttttttcttttgtggcagttactatggtatggtatctaggaaaccattgtccgaaacaaggttacaacgatttatacctgttaccttctaagagttttgtagttttagctcttacagttaaatctttgattcattttaattttcatatatggtgtgaggtagaggtttgactttattcttttgcatataaatatccagtgtcccagcaccatttgttgaaaaagactattcttgccaggtgcagtggctcatgcctgtaattccagcattttgggaggccaaggtgggcagatgacttgagcccagaagttcaagaccagaatgggaaacatggcaagaccacatttctacaaaaaaattatccaggcatgataacatctatttgtagtcccagctactcaggaggctgtggtgggaggatctcctgagcctggggtggctgaggctgcagtgagccttgatcacgccacctgggcaatagagcaagaccctgtctcaaaaaaaggaagaaaaagactattatttcccccattgaatggtcttggcactattacacaaaatcaattgtccatagataatatgggtttatttcttaattcttagttcttttctttgatctgtgtgcctgtgcttactgtagtaccacactgttttgattattgtagctttgtagtaaattttgaaatcagcaagtgtgagtccgttatctttgttcttctttttcaatattactttgagtatccggagtctcttgcattacaacatgaattttaagatcttcctcaccccctgcccccactaccatttctgcaaaaaaaaaaaaaaaaaaaaaagtgcggattgcattggatctgtagatcattttggggaatatttatatataatgttaatgaggttttaaacaacacttttatctactagaactgatatttgcctcgaaatgattccaccttgagccccattcaggaacgttagtattttagaagtagcaagagaactgatttagcatgctatcatcttttactccaaattttggtgagattccagagaaattatttgtgagcttttccttaagccatgatgactgacatgtcagtagtttttgtctgtttttatgccattcttttatttttgtgcatgtgtgggcacctcaaccaaatggatggagcctgaggcatggtctcccacgccaaagtctgccgtttcttttgatgatccaatgcagttccaaagctattttctcaactcaccagctcgtttgtatggccctgtaatttgaaacaaaatctaaaaagaaatccaaattaaaatgattgggaagtgaagtcagaccacagtggtggctgtggaactacttcctggcatggaacactagagcagatgtgtcctgctttttttgtagagtcttgggaacaaccaatgattttagactggaacaagggctggttattctgtttttcacaagcatctgccttcaaggttcattttttaaaagaggaggggaaaaaaatcagtgatgtttgccaccctgagtatggagatgaatccaaattgagattaattttgaaatatgtttcccgaattttgagattaattttgaaatatgtttccacaaacactaactgggaatgacatgagtttgtttcatgtgagacggagtttggaagacatgttaatttgcttgttggtgttcaactcagaaacaaattttgcatgtattttctgagtaagtgccattattagttaacagttttcctgccgtatgcactatgggctgctttagaaagtaaatcatagaaggttagttataatatctcatcaaaaatagtggatccatctattaaccggttccaagttatgagacgtgtccaaaggaatgttgacttggtgtgcacctaaacactatttgtgaagaggctttggacttcgagcatgaaacggggtcagagggtcaaggccagggcgttacttaatttcagctcctgttgatggattcattgacttcagatagtgcgtttaaaaaagcctgtttaatgtgtttgtcttttgataattattatgtatttacatatgctcctaaaagcatgagttaaatcttatttctttgaaacagtgcttggcaacaacttgtattgtcttgtacatgccttttgtgtctttgcttttggttgggggggggcattgaaatttgtctgcccatcccctgagggcagatactgaggtgtggacctatgtcttcagcttcctgtatagcattgaagttgctatagctgcatgttctctaaaatttttatacatgcgatttaattgttaaagcttatgatttttaagtatagtattctgatagcaaatagattttgtcaaataaaaactaactttatcatcaccactgagatatcactaggtatatggcttagttctcagtcaccacttttatttgtaaggaagtcttagaagttttcacaagtgtatatgtgatagactgggcacagtggctcacgcctgtaatcccagcactttgggaggccgagtcaggcaggagttcgagaccagcctggccaacatggcaaaaccctgtctctactaaaaataaaaaaattagccgggcatggtggcacatgcctgtaatcccagctactcgggaggctgaggttggagaattgaacctaggaggcagaggctgtagtgagctgagatcctgccacttcaccctagccagggcaacagaacgagactccatctcaaaagagaaaaaaaaaaaaaagctgggtgcggtgctcacgcctgtaatcccagcactttgggaggccgaggtgggcagatcacctgaggtcaggagttcgagatcagcctcaacatggagaaaccccgtctctactaaaaatacaaaattatccaggcgtggtggtgcatgcctgtaatcccagctacttaggaggctgaggcaggagaattgcttgaacctgggaggcagaggttgtggtgagctgagatcgcgccattgcagtccagcctgggcaacaagagcgaaactccatctcaaaaaaaaagaagtatatatatgatgcttgctttagcagcacatatactaaaattagaatgattaaagagattaacctggcccctgcacaaggatgacatgcaaattttgtaaagtgttttatatggaactttacttacatgaggtacctagggtagtaaattcatagatacagaaagtagaatgctgattgccaggggctgagaggatgagggactgtggagttagtgtttaaagggcacagaggttcaatttggcaatattgaaaatagttcagtggggaagatggatggccgtgatgcatcgtccatcacattgcacagcatcgtgaaatatacttaataccctgagcgttacacttaaaatggttaaaacagtaagatttatgttatatatatttaccatgataggatatatatatgtatattcatatcattcgccattgtgaatagcaaggagattgaagaaataaggacacaggatcttcaataaatatgtattaaatgcttcccatgttccacattctttgtcattgccagacacgtcacaggtataagggcccaatctttgttactcaaataatttagaataatttagaatttgcttggggagactttggataaacagttaagaagctgtatccattaggtaaagggacattgcttgctgcgtctcgtagcatttggtagtctcgttagacagccgttcttactcctatcgtttgctgaaatttattagcaaaggaaagaatcttagttttcagctcgttcagccgcatgatttcataggctcaggaaaaccatgtaatatgcccaaggtcagacgtgatgaataagactaaagactgaatctattccagtgtctctgtgtccagtgatacttacttactgctgttgccaagttaaacaaaactgggtttgcagagctgtttattcaccttcagcatcttttcattgaaaatgcggtagatagaagaaatgtccctcttttagcatttgtacctcagtaataagatgcttcccaagctcaaagactccacacccttaaatatgtaagtcagtgttaagatatttaaagagaacatgaatatcagctacattgtgcatgttgcaggaattttatattattttgtatcttctgcttagaagtcataagccagcccatgaaccatgccaacaaacataccttcttccatgtgattattgcagccagatttttcagtgcaggacaagcaaagttttctctgaaagcatgagataataattctcagccaggtcttcgccatttgcaagggatcagacataagagtttttagctctgttgatgttaatagctagagcccctgttagcagatggcatgttagtggcctgttgctgctggctattaaatcatacacattggccaggcacggtcggtcacaccagtaatcccagcactttgggaggctgaggcgcacagatcacaaggtcaggagtttgagagcagcctgaccaacatggtgaaaccccatctctactaaaaataaaaaactaggcaggcatggcggcacatgcctataatcccagctactcaggaggctgaagcaggagaatcacttgagcccgggaggcgaaggttgcagtgagccgagatcacgccactgcactccagcctgggcgacagagcgagactccgtctcaaaaataaataaataaaaatattaaaagtaaatgatacacatcatgagatcatctcccaaggcagcagagaattttgcgtatttttttcttagtttatattgttgcaacagagtaattcttcttgatcacagactttgctttttttgttgttattgtttctaagtttcacttgatcctcaaaataacctgagacagacaaaacagataggttttcccattaatctccttcatgagtctgactttgccagccaggctgatcttatatccatagccctggatgcatttatttatgttattccatctgcctataatgcccatccccaatcttggcctattacatgtgtctaacattactttgatgtgtacatgtcagtgaattaccacttaactgattgttagctttttgagagtatgtatcaaatctcatgtgcatttgtgtgtcctgaaacaaattattaggtataaagtatgtattgcaaataccatgcccagggaatatttcagagctgtggttctccaagtgtggtccttagtctagcaacatcagcatcgcctggcatcacctgggaacttgttggaaaagcacattccatgatcccacccctgacctcctgaatcagcaaagctagggatggggctgagcaatctgtattttatcaagctgtccaggtgacattgataaatgctaaactttgcgaattactgatttagagactaatcaactcattaaaaagttaataaataggtgagaatccattgtagcaccccagtcacctatgctattatcttctaaattcacattatacaaattgtatgccacaaaaatgtttaaggtgaaaacccaaaggaattgatgcattggattaattcacaaaaatttaacagctgcaattcatagaaaaaaaatgcatgcatatctgataattagttgtagattaaaaggtgaacaacttcttattattaatacccaatgaaaatgtaattttttaaaaattatggccaattggtagttttttaaaaatctgttatgccttgtcatgataaggataggtgaaaaggaactttcataaactattgctaagtatatgggtgaaaccttttagactatttgggtctacctaataaattaaaatgttcagtcttttctaattttagcaccgtatttctacagatacactggcatatctgtggagaggggcacttctgcttgtcacctgatatcccttactactactaatatttttataagcattattacctttaaaatcatgttaaagggtaaatgatgtgcaacagactcagtttccccttctctgactcctgtttagtttacatctcttttctctctctcatttgggggctcaatacccttaagattatagagaaattgcagtaggtaatgttggctggaaatgctaacttgtaagaaacttgggtggaaatggtttaagccatcagcctaaacgatcagtgaaaatgtcagacattctccgctttcttcttccaagatactatactctactgtggccttagagttcttaattcctatataattctgattaaaaaggaaggagatgctcctaatataccttgctgttgtcccctcctgttcattagggtagctgatgtcagtcaaaataaagtctagaaattcttgagtactttttttttttgtaatatactgagaatgcttgaagcaaactaaccaaatttaagtgttttaaggatattaacagtaacaggagagcccctcgattttctgctaagaatcaacctgaacagtttccagactgctggttggcaatgtcagtatcatgagaaaaactgaaaaaataagaaactttagagaaaaagaggaatcagtgcaggctaggggaatgaacttggtaatccagtagtctttccctgccagcattttgattgataagctaagtgtctgctttttctcatcccttattttttggcaggaaaccagtattttgatacttgaatgccttctttctatcttaagggagaagccttcttaaacttcaagtgtgaagtagatcctttaggtataggatgaaaaattaagtgggactatttgtgaattactaaatcgcaaccattaaagaaactaatgccctaattagcctgtcttttgacagacatggcatccatatgtaagtctaatattgtatgcaaatgtgagacaggttttgctttctagatctctttgatgtgaaaggaaaagctggcttcctggcttccttcccatgttctgtatggacctgccttcatcctgctgccaacagctcctcaagggaacatgaaagtggaattaaaccctcctggttttcagattcagaatcctgggtgattaagtggcttgatcaaaatcagaaactgtgaaagtgctaaaaatggtcaaggcccaaggagttcctcatgtgtggtcaaaagcctttcagaaatcaaagtgtgtctttaaatacctggggtgcaaaaatcagatgttttttatttaaagaaaaataggtatattagagcagaactgggggccctctgtaggagcctgagtctgggtgtttactgtcgtctaaggccttgttaatgtgggcttgaggcttcggaatccacgaacaggggaagctagcgtctctcgctgactccagtcctagctcgagctttccatactgccctacgtgacttctgcacttttgtgccatcagccagtagactgagaaaagtatctggtatttgtcggtgtcttcggtttagctgctttaagtccttggatggaaaaggctgattgtcatcctgaaatcattgtctcctaatgtgtaattggggccaagtgaagcacagtaatttagaggaattctagttaaaaatacagattcttgggctctacctcagacctacagagatctgcatttttcttattcccccaggtgatcctttaaacattcagaggtttttaaaactcatgcttatatgcaataacaaaaatataaggattcttagaaacttgttatatttgtcttgaacatgggatgacagacattgtcattttcattgaaaaaaaaaatgaagcagagactcagaatgtatttagagacaactctaaatacattctggcagagcctaactactggattgcagagatcctccctgcttcccccagtccccatctataaactggccatgtgaatttctagtggtgttcacttccaaagtggtgattttataaaatattacaatgaagcattattaacctcaagaagttcagatgcatagagagtttatttgggtgtggcagcattagtggctaggttttatttatccaagataagacttcttattagctatgaaaagggattggcataaactgcttattaatgtccattaactgtatctaaagggaataaacagtataaaaggccaggcatggtggctcacacctgtaatcctagccctatgggaggctgaggcaggaggatcatttgagcccaggagtttaagaccagcctgggcaacatggggagaccctgtttctacaaaaagtcaaaaaaataataagctgggtttaggggtacacacctgtaatcccagctagtcaggaggctgtggttggaggatcacttgagcccaggagttggaggttgcagtgaggcctggcggcaccactacactccaggctgggtgacagagggacgaccttatctcaaaacaaacaaaaacaaaaaactgtataagcataagatgggcttgagtcacaaaattctgcctttcataactttcccccatttgctgtttgatttgctgtttcagaaattgtgaacctacttctctacttatagaacatttacctccctcttagattcttccctttctatcattgatactgacattctgcttaaagaattatccatttaggctctcttcaaatccaaagtgatattattttattttaataagagatgaaagggaaaattgacaaaatgtgcctggagttgtcagcattgtaaatgatggactgtaaaagcttcgtcttggaagattgtcagagagcctagtgccagctcaaaaagtgtggtctttttagagaattgacagaaatgttacaaagaaaacatgtgctgaataccaactccaggtgcgaatcctgagaagcaactcactctattctgcagtaggagatgaattttgcaggttatacagcagagcaatttaaactcccttgtttcttaaagtatatcctatagtgacttgggatggaagtcatatactatccccttttttgttccttcaaagtaaatacaccacagagctggagatgtcccagacacagggggaagctgtttggatttttcccactgcctgtaatgaagcaagatagggaggaagaacttgggaacttgcgtggcaaatggtcaagtaaagaaaaagaaaagctttttctttacttgaccatttgtcacatgtgctttcaaatcctgaactgagtcacatctgaaataaatcacttccttgtcatttccatgaaaggggcagtacaagaaattccttgcacatccctggtgagccccttgttactctcagattcagctattgccttcaggaaaaaaagaaaaagaagccgaagaaagaaagaaaacagaatcctctagaaaaagctattctgacctgtgctctttcttttgtctgagtgtgactagataaatgcattagtctgctagggctgccataacaaaataccaaaataccacagactgaatccttcaacaacagaaattatttttctcatgcttctggaggctggaagtccaagatcaaggtaccagcaggtcggtttctgaggaggcctctcttccttgatttacaaatggccacctacgcatcatgtcctcacatggtctttctcagagagaaagagaggtgtctcttcctcttcttcttttgttttgttgagacagagtttcgctcttgttgcccaggctggagtgcaatggcacgatcttggctcactgcaacctccacctcctgggttcaagcgattctcgtgcctcagcctcccgagtagctgagattacaggcatgcctggctaattttgtatttttagtagagacagggtttctccatgttggtcaggctggtctcgaactctcgacctcaggtgatccacctgccttgccctcccaaagttctgggattacaggcgtgagccccgcacccggcctcctccttttcttataaggacacctgtcctattggatcagagtcacacccccatgacctcatttaaccttaattatctctttaaaggtctgatctccaaaggtcccttgagggttagggctttgatacatgaattttcaggggcacacagttcgatccatagcagttggcttattcatactttgggtagatcctcttcatcgttcctcagctactgtctatttagtgcacagcttctttatcctaaagctagtcaggggaggcatggaaggtattatttctcctgtttctgcacctaaggcattaaaacgaggttgtggtctggcagcctaaactcggccttgatgaacttcaaatcctagacctccttggtatgtgaagtgcatacacttgtatggagggatttgacaggttttttttttttttttttttttgagacagagtctcactctgttgcccaggctggaatgcagtggcacgatctcggctcactacagcctccgcctcccggtttcaaatgattctcctgcctcagcctcctgagtagctgggattataggcgcgcaccaccacacccagctaatttttgtatttttagtagagacggggtttcagtatgttgatcgggctggtctcgaattcctgaccttgtaatccactcgcctcggcctcgcaaagtgttgggattacaggtgtgagccaccgcgcccagcccagatttttttaaattagtttttagtgtatccacactgttaaagcaggtggatactgctggatagtataacaaagtatagtgtgacaaacccataaccaagcattgttagctatattttctcatgtcttgagccaaaaggtcacagttaacctaatgttgctactaaacactcataccataaaacattctattccagtcttccagattttacacaagaataaaatgaaaacttttagactactggagatttttttttaaatacacaatttgttgaatgtgaacgctaaattgaaattgacatgctaagttttatagattacttcagctgccctgacttcagtaaatttagttgtgacacaggtacaacagctgacttctttctggcattagaggtggtgatgtttcgtcactctggagttagtaaaacctgaaacccgccaggcatttgacacacagtttgctgccagggacagctcagcttctggcttattggagaggaaatgacctaacctctgtgtttacaaagtgtttgaaactgaggcccttccacttccttgctgagtgtaagggttgacctggcatccaaaatccccatgatcttctcaggataagtcatgcagccattggtggtcaagaaaggatttgttccctgtggaagggcattggaagaggaacagagctgaaacacacgggtgttcagagggaaaacatctctgcacttaagagggctagattagactattagactattatcatagagctcgtgattcatctcctttgtttaattccagccttgagtaaaggactcactaagaaaccacattcggccgggtgttgtggctcacgcctgtaatcccaacactttgggagaccgaggcagatggatcacaaggtcaggagttcaagaccagcctggccaatatggtgaaaccccgtctcaactaaaaatacaaaaattagtcggggatggttgcgggcgcctgtagtctcagctactcgggaggctgaggcaggagaattgcttgaacctgggaggaagaggttacagtgagccgagatcacgctactgcattccagcctggtgactggagcgagactccatctcaaaaaaaaagaaaccacattctattccagtatatttattataaccagaaattcttgtcttatcagcaaatagctaatattcacttacatgggcagtgtattagattcctagggctgctggaaccagttaccacaaaccgcatggccgaaaccaacagaaatatactctcattatctcattattctagaggttagaagtcctaaagcaaggtgttgccagggccacactgcctcttacagctctaggggagaatctgtttcatgcctttcgcttgctctagtgctgctgccagcccttgatattcctttggttggtacatgcacccctccaatctccacctctgtcttcacatggtgttactccccatgtctctgtttctgtgtcttctctaatatgattaagggcccacccttctccattgtgacctcaatcttatatctgcaaagaccctgtttccaagtaaggctgtattcttaggtgtaggcattaggacttcaacatatattttgggggaaaattcaacccataatgcggttatgtttttattttccttgacttttaagaatgtgaactattgtcaaattttttcaaccactatcaaatttaaatctaagaactacatgtcttaaatttatgacctcttcattaaaaaaaaaataataacatttaattggtaccaaaacgtgaaagagtttaatgctttgcatttgcttgaggctgattaatgagtaaatgtgtcaactgtggctgttttaattagccagggttaattaatgtttaccacacttggaagatgaaaaggcatgtataaatgctctataatgtgaatcattttttaatttgttgttgaagcttatagtgtagccaagtaaggattgcttacatcatacttacaaagggaggttcattaatggatacaaatacacagtttgatagaagaagcaagacctagtatttaattatcagcaaggtgactaatttacagtaatctactgtatatttaaaaatagctaggagaacctaatttgaaagtttctagcgtaaagaagacaggctgggcacgatggcttacacctatagtcccagcacttgggaaggccgaggtgggaaaatcacttgaccccagcaattcaagactagccagggcatcatagtgagaccccatctctacaaaacaaatatttaaaaattagccaggtgtgatggtgcatgcctgtagacccagctgctctggaggctgaggtgagaagatcacttgagcccagcagttcaaggttcaagtgagctatgatcacatcactgcactccagcctgagtgacagagagagacccttcctcaaagcaaaaagaaaagaaaaacatttaagtgatggatatcccattatactgatttgatctttccaaattatatgaatatattaagttttctcatataatctgaaaatatgcacatctattatgtatcaataaaaaataaaattttaaaaatgtaaaaaacgatgttggagcactatggtacttaacgtagaggctctgacttttgaggtacattcattacctgttactgaagttgagtatgctttaatattgtatgtttagaaaaggtagttacatttttaaatctgattgtgtaagaagaaaagagtagaaatgtttggggccaagtcaataattatttagtatatcataatttgagatgaaatgtgtttttttttttcttttttagtttcaagttgaaacattttaagaacagataaggaaaggctaactgtgctgagatgaaaataacatttttaaagtaactatcttaaagaaaatacatttctagaattttgtgtaaattttcaacaaagactcagaagcctggatgaggtcttgtgccaagactggaaagtgtggggattagaaaaagtttgaagagattgttgtgagatcctctcgtatgaggcctgaagctgtacatccatggaaagcagttaccccaggcgggaaaacaggttatccattctcgagtgagtggccgggtgggaaatagtccatcatgtcgaatggatcgtactttccagcaccaagatttgtggttctctaggtgaataagatgacaccccttcacttcacttcacttcaccattgtctgcatggagtacgtatctaaaaacaaattagcaaaaaggttgggtctactttacttttcatctcctacactattttcttctttgttctcggcaggaaaagatgaagttgcattttattattatctcataggattcttattctaaaatgatttgatttaaaacccattgcactttatttggataaaaaatgcttcactctctagttcttaacaataacaccagcctgattttattacgttaagcactgcaattagacaatacaaagaatttgcagcaacaacatgttattttatcatgggtggaactgttcattgtctagcagaatttattaccagataaatcccttttggggaatctaatgtggatgtttttttcaaagcgcctgtggagttctgctagtattgggaacgtttccattttcattctgatgcttccctgtgggctgtttcagcatagaagtgagctctctgggtccatgtttccattggctccacccaatattctgaaagattgcaactcaacatgtgtaaacagaacctttctcccccatattttctcttttcgtagattaaactcaggtcaagaattagaagtttatcctccaccccgatagcatctcgccctatcccaaataccgccaccaaaatgcccactgtttttccttgggccagttcctgaaatatctttctggctgtatcactcttgtgtgcatccttatcggctatgcttttggccattttttactgctgactttgtctggttagtcttttataatctccaggcttctcctccatcctttttttacagtttacctgttcatgaagcgcaggtcacttgacccgtagaattcccataggctgggattttgctaattgcatactcatggtataggtcagtgtattcctctgccctctgtatcccacaaactgaaagcctcttggctaagctgcttcccttttcacttcccttgtaccacagcagccagaagagtcacagatcctgggcagcttgtcctctgtgcctcggtacatgcacttgtatctgctaggacaatgatctctttccctggggccccactgtaatatcactagtcacatccctaaagcccaggcttgtttctttgtcattctgtcggtatccctaccataacacttgtaatagtaattatttttatgcccatcttttcttctgaaccatgagcccttcaagtgaaaagaaattgatgaagttatttctagcactcccctggaaaaaggaaggcaggcagggagggaggggctcactagtttatgataaagtggtttgattttcttggttgcagattatttcttttaaagtgactcttttcagcttctctcactcctgtgcatcgtgaatgctctcctgaagacagacgctttccattcatttccaagccccccatgtgaagtgctttctgttgccaggcttggtttccccacacgttgttaaagaagttaaagaagcttgtgaataagctaaagcagaggagaaagaaccattgctatatctagaattgttcaccagaaagcaagttttgtgttaaagaaaacacgagtaggccactgtgcagaagtgcttacagggtttgtgtgctttttaaaatctgcataaataaacatttcaaatgagctatcatatatacaaggatgatgtgctgtctgtgggaaaaggacccaatcctgtgttgtgattttacatatatatatatatataatttgtgctattacacacttgcctgatccccttataattatctgcataagtctttttaggctctttgaatgaaattcactatgtatggatgttgaaaatcatcctttctaccatgagctcatcagacttgctaaccaattctttgcatcctttgaagtataaaattccatcaattcagcatgtatcaacatgaatcaattagaatgcactttcttcacagcatggcggagtttttgctggctgccgggagcggcactgtttcccaattcattcatttgcttgggcccgccccaggatccttcttatcccggtcagatagacttctctcatgagcttgagagacggggctggtcacacaggacacggctttagggacacgactcactgaaactacaaaatgagtgctgctcttagagttgtacccacagcctgcacagctgttatggcaatgctgtgggcaagtcttgctacggcccattctcctccctcccttgtcctgttggaaggttcaggttggagctgaaattcagtccagcacgcagctggacaagccatgtctcctgtatgtgactcactccccagagaaagcatcatgtggactagtaagggcttggctttatcagaagcaaaggagaggtttacatctcttcttgctctctcttagtgggttcagagctccagcagaaaaaatgggacactgtggattgatctccagaaaaccccaaaaccagcactgaaggctccaggagattatgcctttagattgtatacaggcaccagaatgacttttgcctttataaaaatgcgtgcaagagcatgaaaactaatatttgaggaatttttttttctcactgtactttctggtcctcactgaaagcattggcagttttaaaaaatgaaatgtgatactgttatagacgtagcaaacctcacgtttcattttttccaattcattctatatctaggaacttacttagaaggagaaacaaactgtacccagaaaaaggaatgaaactggagaattcttcctcatgattcctctgtgtcctcaggcctaattatcctcattccaaagactctccattgcctcaataacttcgaaaaatttactctccttaagcatagtcataaaaattgcatagtaaagtgataaagagacgaaaataatgctgtaagaataaaaccattaaaaaaaaaccactactcttgattatttctgctgttagaattgtaaatgaattctcattccttttttctacatttttggcatgaaatttatgttactcttataattagtaaaaacattatattttattaataaaagaagactcacagtgaagtcataacatatgctgcagaggttagactcttcaagtcagatttgaagagagaatttcacgtaacaatcaccttgaaatgtcttcaggtcagccatcaaagtacacatctctcaaccagccaggcagccagtttttcctccagcatgtgaagagtgaagagatagctgtttcttggcttaaagaccatatgaaataattgacttatgtttaaaagatatgagggatcaggccgggtgcagtggctcatgcctgtaatcccagcactttgggaggccgaggcgggtggatcacaaggttagaagatcgagaccatcccggccaacatggtgaaaccctgtctctactaaaaatacaaaaactagccgggcgtagtgatgcgcgcctgtaatcccagctactcaggaggccgaggttgccatgagccgagattacgcctctgcagtccaacctggtgacagagcaagactctgtctccagttaaaaaaaaaaaaaaggcatcaaaattacattcacttctatttttatttttgtttgtagaagacatgcagtttgtatcacattaatgggcatatgatgtaatttcactataaatcgaaccagaggaagacatccaaatatgtataaattaaagctgacaatgcctacagtactaaactttttgttttagtataattggagacttagaaaagttctaaaaatatatttaaaaatttttaaaggaagttgcagacataatggccctttacacctaaatacttcactgtacgtttcctcaaaacaagaagatatgtgtgtgtgtgtttgtgtgtgtgtgttgtaatcttaatacagcatctttcagagattatttctgtagtatataaacttggtttttttgtttgtttgtttgtttgtttgtttgttttgagatggagtctcgctctgtcgcccaggctggagtgcagtggcacaatcttggctcgctgcaagctccgcctcccaggttcacaccattctcctgcctcagcctcctgagtagctgggactacaggcgcctgcaccatgcccggctaatttttgtatttttagtagagacgcgatttcacctcgttagccaggatggtgtcgatctcctgacctcgtgaaccgcccacctcagcctcccaaaatgctgggattacaggcgtgagccaccgcgcctggccataaagttgttttttagtctctactttaagttcctgacaacccaggcaggaccaagactccctaatgtagttggaaatcagatcagcacattggcacaagttctacaggtaaacgggaaaaaggagccctacaatctgcttttagatgccagggagcctggctggtctttatcttgattactgactgatgccactggtaggtctaagttctttgatctatgatgtttgaaagccaaaaggaaatgtgttttaaaggaaaagggacttcttctgtaccctcagtctaagccagacaagtgatatttcaggaaaatgtccctagcaataaggaatattttcacaaatgatgtgaagctttgtttgtgtcccttccagggcagtttgttaccataaggggacaaagcatgcttcatttaaacatgtgtggccaggaaactgttatttttaaacaaaaataaaccccgatttagacatgtagtctgagttttaactctgggagattttcaagattgatagtgtagctaaaaataactgacctaattttctggaggtcaagataaaaactggatttatggtacagcatttactttgtgataatatgtgtataaattcttccccaagttggaaaatgtggccgcgtcatacagggctgtatctctcttgaccattgaagtgcctaggtcgctacactacaatttgacttagagttggtgaaacttctggccattcacgtagccatcgtattcatcctgagaaagggaaacctaaagacttgggagagtgttctgggaggaaagtgctattgagaatgggctgtccaagcaaagtgacaggcaggcctcacttagctagaagagggagcttttcagccctgctccaccatcaggaatctccgtgaccttggactactgctttaatctcttttatcctggcttctaaaagataccgtcgaattcattctttttcaaacctatcaaaaatttgaaatgtatgaaaaagagggtgcttgtgatgatagatgggtttatgcttccttttttttttttttttttttttttttgagacggagtctcactctgttgcccagactggagtgcagtggcgcgatctcggctcactgcaagctccgcctccggggttcacaccattctcctgcctcagcctcccgagtagctgggactacagtgccaccaccacatctggctaattttttttgtattttcagtaaagatggggtttcaccatgttagccaggatgctctcgatctcctgacctcatgattccaaagtgctgggattacaggcgtgatatgcttctttaatattagtttctaatccaagtaatatagccatgtcctctataaaatggaacttttcatggaacagtgagaaggttgcattaggaattgggatacttgggttcagatttcagttctgccacttgctagttttaagtatacttctcaggatggatgtcagtttgttcaactgtcagtgggagtagtgatcccactaaggaagattattgtggttatcaaatcagcagatgggtatgaaaaggccatgagtgcagttctcatggttatgaaggtgtcataactggcatagtcccatcacagtatggctttggcatcgcagatggctgtagcatatatgctaatcagaacatccctaccgtccttaaagatctcatgggttctctcccaaatcagctgctccaccgacctacaagtaagtccatgcttctttagtatatttactcactagtgaaggcccgtctgctaaaagtgtcttcagtaggggagagctgctcttttctgggaaacccagcaatgaagtttgtcctgtgatgccctctacacttactgacctgtttcctgagaacttcccgtaacaaatggtccagggaagaaggaagtctgtgaccagtctttcctttcctgtggctttctggttcagaaatgtgaccctgatgataagaaacttcaaggcatgactctggtgttttggcaatattcccctggcagtattgtttcttggctcacactcatctcatgccttgctttgtttgctttgtttttgagaattgtttttttgtttgttgtttgtttttggttttggcttgtgagacagagccttgctctgttgcccaggatggcgtgcagttggcacaatctcggctcactgcagcctccacctcccgggttcaagcaattctcctgcctcagcctcctgaataatggggattacaggcacacaccaccgtgcctggctaatttttgtatttttttagtagagacgggtttcaccatgttggccaggctggtcttgaactcctgacctcaagtgaaccacccacctcggcctcccaaagtgctggggttacaggcgtgagccaccacgcccagccattatgtttgtttttctttcatgaagggataaccgaggctgttgtgtggtggtgtcttggtacagctcgtggctgtggtcagtgtggtggagggtaggtcttctcagatggtaacatgcatgagagtcacctggggatcacattaacatgcagattctgattccctggatctgggtgggacctgaggttctgcatgtctaacaaactcccagagaacacccatgtagcaagagtacagacaaaaggattcaaagcgaagggactgcaagaaccatggaaccagcctcccacgattttgcggatgacgaacccgagccttggggagtttcagaggccatggagagatgaagtataataaacagcatagcagttgtatgttgagccaagaatcagacatgcacagaactgctgattggaaaattaaatctgtttctcatagccctggtgtggcaaaatgcctagctggaagtgggtgaccgcttgatttacagtgggcctcctgggtagggaaaattagtccatcccatttacagctacttccaatgcagctgtgtcaggggagagagaagaaaggacatggaagagagcgtagaggtatgatcttcagtcctttcaggcaggcacataagtaaatttttatttaaaagataagaattggtcatatgcgaatctcctgttagataagattaaaaacaaatttccattttgtggagaagttgcagataaatatttttccatgggatccaaaagaatcaaaaaggaaagaaaatagtaatagcagtggaggttcgatcctagacagaagaaaatccagcaagccgagggacttcatattctcactggtgtccaaatcagagctttttttttttttctttgtttactttaagttctgggatacatgtgctgagcatgcaggtttgttacataggtatacatgtgccttggtggtttgctgcacccatcaacccgtcatctaggttttaactccgcatgcattaggtatttgtcctaatgctctccctcccctttcaccccacccctggacaggccctggtgtatgatgtccccctccctgtgtccatgtgttctcattgttcagctcccacttatgagtgagaacatgagtgtttgggtttctggtcctatgttagtttgctgaggatgatggcctccagcttcatccatggccctgcaaaggacatgaactcaacctttttttttttccttttttttttttttttgtatttgcaaattcaaatctttttttttttttattatactttaagttttagggtacatgtgacattgtgcagcttagttacatatgtatacatgtgccatgctggcgctgcacccactaactcgtcatctagcattaggtatatctcccaatgctatccctcccccctccccccaccccaccacagtccccagagtgtgatattccccttcctgtgtccatgtgatctccattgttcaattcccacctatgagtgagaatatgcggtgtttggttttttgttcttgcgatagtttactgagaatgatggtttccagtttcatccatgtccctacaaaggacatgaactcatcattttttatggctgcatagtattccatggtgtatatgtgccacattttcttaatccagtctatcattgttggacatttgggttggttccaagtctttgctattgtgaataatgccgcaataaacatacgtgtgcatgtgtctttatagcagcatgatttatagtcctttgggtatatacccagtaatgggatggctgggtcaaatggtatttctagttctagatccctgaggaattgcgacactgacttccacaatggttgaactagtttacagtcccaccaacagtgtaaaagtgttcctatttctccacatcctctccagcacctgttgtttcctgactttttaatgatcgccattctaactggtgtgagatgatatctcatagtggttttgatttgcatttctctgatggccagtgatggtgagcattttttcatgtgttttttggctgcataaatgtcttcttttgagaagtgtctgttcatgtcctttgcccactttttgatggggttgtttgtttttttcttgtaaatttgtttgagttcattgtagattctggatattagccctttgtcagatgagtaggttgcgaaaattttctcccatgttgtaggttgcctgttcactctgatggtagtttcttttgctgtgcagaagctctttagtttaattagatcccatttgtccattttggcttttgttgccattgcttttggtgttttggacgtgaagtccttgcccacgcctatgtcctgaatggtaatgcctaggttttcttctagggtttttatggttttaggtctaacgtttaaatctttaatccatcttgaattgatttttgtataaggtgtaaggaagggatccagtttcagctttctacatatggctagccagttttcccagcaccatttattaaatagggaatcctttccccattgcttgtttttctcaggtttgtcaaagatcagatagttgtaggtatgcggcgttatttctgagggctctgttctgttccattgatctatatctctgttttggtaccagtaccatgctgtttcggttactgtagccttgtagtatagtttgaagtcaggtagtgtgatgcctccagcttcgttcttttggcttaggattgacttggcgatgcgggctcttttttggttccatatgaactttaaagtagttttttccaattctgtgaagaaagtcattggtagcttgatggggatggcattgaatctgtaaattaccttgggcagtatggccattttcacgatattgattcttcctacccatgagcatggaatgttcttccatttgtttgtgtcctcttttatttccttgagcagttggtttgtagttctcctttaagaggtccttcacatcccttgtaagttggattcctaggtattttattctctttgaagcaattgtgaatgggagttcactcatgatttggctctctgtttgtctgttgttggtgtataagaatgcttgtgatttttgtacattgattttgtatcctgagactttgctgaagttgcgtatcagcttaaggagattttgggctgagacaatggggttttctagataaacaatcatgtcgtctgcaaacagggacaatttgacttcctcttttcctaattgaataccttttatttccttctcctgcctgattgccctggccagaacttccaacactatgttgaataggagcggtgagagagggcatccctgtcttgtgccagttttcaaagggaatgcttccagtttttgcccattcagtatgatattggctgtgggtttgtcatagatagctcttattattttgaaatacgtcccatcaatacctaatttattgagagtttttagcatgaagggttgttgaattttgtcaaaggctttttctgcatctattgagataatcatgtggtttttgtctttggctctgtttatatgctggattacctttattgatttgcgtatattgaaccaagccttgcatcccagggatgaagcccacttgatcatggtggataagctttttgatgtgctgctggattcggtttgccagtattttattgaggatttttgcatcaatgttcatcaaggatattggtctaaaattctctttttttggttgtgtctctgcccggctttggtatcagaatgatgctggcctcataaaatgagttagggaggattccctctttttctattgattggaatagtttcagaaggaatggtaccagttcctccttgtacctctggtagaattcggctgtgaaccatctggtcctggactctttttggttggtaaactattgattattgccacaatttcagctcctgttattggtctattcagagattcaacttcttcctggtttagtcttgggagagtgtatgtgtcgaggaatgtatccatttcttctagattttctagtttatttgtgtagaggtttttgtagtattctctgatggtagtttgtatttctgtgggatcggtggtgatatcccctttatcattttttatcgtgtctatttgattctcctctttttctttattagtcttgctagcggtctatcaattttgttgatcctttcaaaaaaccagctcctggattcattgatttttttgaagggttttttgtgtctctatttccttcagttctgctctgattttagttatttcttgccttctgctagcttttgaatgtgtttgctcttgcttttctagttcttttaattgtgatgttagggtgtcaattttggatctttcctgctttctcttgtgggcatttagtgctataaatttccctctacacactgctttgaatgcgtcccagagattctggtatgttgtgtctttgttctcgttggtttcaaagaacatctttatttctgccttcatttcgttatgtacccagtagtcattcaggagcaggttgttcagtttccatgtagttgagcggctttgagtgagattattaatcctgagttctagtttgattgcactgtggtcggagagatagtttgttataatttctgttcttttacatttgctgaggagagttttacttccaactatgtggtcaattttggaataggtgtggtgtggtgctgaaaaaaatgtatattctgttgatttggggtggagagttctgtagatgtctattaggtccgcttggtgcagagctgagttcaattcctgggtatccttgttgactttctgtctcgttgatctgtctaatgttgacagtggggtgttaaagtctcccattattaatgtgtgggagtctaagtctctttgtaggtcactcaggacttgctttatgaatctgggtgctcctgtattgggtgcatatatgtttaggatagttagctcctcttgttgaattgatccctttaccattatgtaatggccttctttgtctcttttgatctttgttggtttaacgtctgttttatcagagactaggattgcaacccctgcctttttttgttttccatttgcttggtagatcttcctccatccttttattttgagcctgtgtgtgtctctgcacatgagatgggtttcctgaatacagcacactgatgggtcttgactctttatccaacttgccagtctgtgtcttttaattgcagaatttagtccatttacatttaaagttaatactgttatgtgtgaatttgatcctgtcattatgatgttagctggtgattttgctcattagttgatgcagtttcttcctagtcttgatggtctttacattttggcatgattttgcagcggctggtaccggttgttcctttgcatgtttagtgcttccttcaggagctcttttagggcaggcctggtggtgacaaaatctctcagcatttgcttgtctgtaaagtattttatttctccttcacttatgaagcttagtttggctggatatgaaattctgggttgaaaattcttttctttaagaatgttgaatattggcccccactctcttctggcttgtagggtttctgccgagagatccgctgttagtctgatgggcttccctttgagggtaacccgacctttctctctggctgcccttaacattttttccttcatttcaactttggtgaatctgacaattacgtgtcttggagttgctcttctcgaggagtatctttgtggcgttctctgtatttcctgaatctgaacgttggcctgccttgctagattggggaagttctcctggataatatcctgcagagtgttttccaacttggttccattctccgcatcactttcaggtacaccaatcagacgtagatttggtcttttcacatagtcccatatttcttggaggctttgctcatttctttttattcgtttttctctaaacttcccttctcgcttcatttcattcatttcatcttccattgctgataccctttcttccagttgatcgcatcggctcctgaggcttctgcattcttcacgtagttctcgagccttggttttcagctccatcagctcctttaagcacttctctgtattggttattctagttatacattcttctaaatttttttcaaagttttcaacttctttgcctttggtttgaatgtcctcccgtagctcagagtaatttgatcgtctgaagccttcttctctcagctcgtcaaaatcattctccatccagctttgttccgttgctggtgaggaactgcgttctttggaggaggagaggcactctgcgttttagagtttccagtttttctgttctgttttttccccatctttgtggttttatctacttttggtctttgatgatggtgatgtacagatgggttttcggtgtggatgtcctttctgtttgttagttttccttctaacagacaggaccctcagctgcaggtctgttggaataccctgcagtgtgaggtgtcagtgtgcccctgctgggggtgcctcccagttaggctgctcgggggtcaggggtcagggaccacttgaggaggcagtctgccgttctcagatctccagctgcgtgctgggagaaccactgctctcttcaaagctgtcagacagggacatttaagtctgcagaggttactgctgtctttttgtttgtctgtgccctgcccccagaggtggagcctacagaggcaagcaggcctccttgagctgtggtgggctccacccagttcgagcttcccggctgctttgtttacctaagcaagcctgggcaatggcgggctcccctcccccagcctcgctgccgccttgcagtttgatctcagactgctgtgctagcaatcagcgcgattccgtgggcgtaggaccctccgagccaggtgtgggatatagtctcgtggtgcgccgtttcttaagccggtctgaaaagcgcaatattcgggtgggagtgacccgattttccaggtgcgtctgtcacccctttctttgactcagaaagggaactccctgaccccttgcgcttcccaggtgaggcaatgcctcgccctgcttcggctcgcgcacggtgcacgcacccactggcctgcgcccactgtctggcactccctagtgagatgaacccggtatctcagatggaaatgcggaaatcacccgtcttctgcgtcgctcacgctgggagctgtagaccggagctgttcctattcggccatcttggctcccacctcccgaactcatccttttttatggctgcatagtattccatggtgtatatgtgccacattttctttatccagtctatcgttgatggacattttggttggttccaagtctttgctattgtaaatagtgctacagtaaacatatgtgtgcatgtgtctttacagtagaatgatttataatcctttgggtatattcccagtaatgggattgctgggtcaaatggtatttctagttctatatccttgcagaatctcctcactgtcttccacaacggttgaactaacactctcaccaacagtgtaaaagcgtgcctatttctccgcatcctcgccagcatctgttgttgccagactttttaatgatcaccatcccaactggtgtgagatggtatctcattgtggttttgatttgcatttctctaatgaccagtgatgatgagctttttttttttttttcatatgtttgttggccacatacatgtcttgttttgagaagtgtctgttcatatcctttgcccactttttgatggggttgtttttcttttttttctggtaaatttgtttaagttccttgtagattctggatattagacctttgtcagatggatagattcagatcagagctttaacagccagactttacagggaaaaggctgagtggcacctcctttatatgaagaaaatgttcttctccaacccacttgtgttcagtggatggaagaagctgttcagtaattataactgacacttgtaacacataactgattgatttaatgcccataaattttattttctttaatcgtaagatgtgaccgttaaattcttagaagacatttggctagtggattaataattaaaagaatattggatgaattcatctgcttcctattcagcagttcttttatttataaggctatttttctcaaaatgaatgatcatgaatatctaagaaaaaacaaaatatttagctgtttgaagatgaaattattatcttttgatgttgttttctttaaagtgtttacaatgataactaagtggtagggcttcttccctctgttactctaagtatgcctcgtatacatcctcaaagcattttttttttttttttttttggagacagagtcttactcggttgcctaggctggagtgcagtggcatgatctcagctcactgcaacctctgtctcccaggtttaagcaattctcccgccttagcctcccaagtaggtgggattacaggcgtccgccaccatgcacggctaatttttgtatttttagtagagacggggtttcaccaagttagccaggctgctcttgaactcctgacctcgtgatccacccacctcggcctcccaaagtgctagattacagacgtgagccaccacgcctggccacctcgaagcatttgtaaaagagcaaggtgatggggttcattaggtgtttggtatttgaaattaaatacctctgttattgatgaagccatattttaaatattatcaccactaaactcagttaaatatttccactgttaactacaaggttcaaatgcttggatattatagaagatatttgacttcaaagataaacgctacaattttgggtcataacaaatagcttttagaaggggaaaaaataagtcttgggaggaaaataagcagtctcttagtttaatatagcggttggcaaatatagatgcttaaaagttctgaaaatccccattgcaggccatcagagtgttgtaattaagtattaaattaattcagataaaaggataatccatcagggccactaatgtagtggaagtgtggtttcggtgtgattagtctcaccatggaagtcaaagaaagtcccactcagaatgaacaatgaaagaatcatatttgtctctgggtattttgtcataggctcaattgcccagtgccagtgtgtaagccactggtaaaatcctgagcccttagtcatgtctacaggtagctggctgccttagacattttatgatgacgaaattgaattccacttctgataatggtaatccatcatgtctacctctttttttctcttaaaactacactgacggccaggcgcagtggctcccgcctcatcccagcactttgggaggccaaggcaggcagatcgcctgaggtcaggagtttgagaccagcctggccaacatggagaaactctgtctctactaaaaacataaaaactatccggtcatggtagtgtgtgcctgtaatcacagtactcgggactgaggcaggagaatcgcttgaacccaggaggcagaggttcgttgttctgaatgacatagccaggggtggttatttctaaattttctgtgttgaattaagataggaatgtggatttcttcctattttgaacaacgaccaaaaaaaaaaaacgaaggctaagtgtgtttcactctgctaaaaatgtaccttttcttgaatctgtcactttttcacttacattttctgaaaatgaatataattaaccaccatggggctcagcatgctggtggccatttggaggaacttttctaccaacagtgtaacagagaaaagagaaaagggtactacagcgtacctcaacctcccctgactgttctgtgaagtacaagtgtaagatttctcactgtgatcttttgctcctctgcctttttactgccaagggctaagatgggcacagggccctttccagctgcccctgcctgagaaatgcttatttgatgaccaaaagcaataaccattccataggactaacggtgattaagtcagcttacaaatccacaagggtggaagagactgctaaagatattggaacagacatgcttaataatgcctaatttctacagctacttttgtgataatacgagaggctgaaatagataggggctgaacatgggaaggctggtgttatgaagcccaggacttggatttcagcactggtgcttactggccattgggtcttgaagagattggttcctttctcccagcctcagtctccttgtcccatcagattaataatgcctgccttgggagaggagagtcatacaggagagggcatttgagctgggctctaaagagttcaaataacgtagatgagcagagatgggcttccaagatagcaggaatagaaaacaaaagtgtcagaatgggtatgcatggtcttttgtgggaataccccaagctatttagcctgagagagaggtgtggtgtagacagctggagctgtgagttccatggctagaaatacggggtgggcccagaccacagagggccttcagcatctggcaaaggagttggaattaattcggtagaaaatgaagacccactgaaacaaagagggagccattcttgtgtgtcaggaactaagatttcaggaaccaaacgtaaaataaaaaccagcagggagaccattgtctcagtcggtttgtgctgttatcatgataccagagactgggtaatttataaacaaacaatagaaatactacaattctggaggctgagaagcccaggatcaagccgggtgcagtggctcacgcctgtaatcccagcactttgggaagccgaggcgggcggatcacgaagtcaggagatggagaccatcctggctaacacggtgaaaccccgtctctactaaaactacaaaaaattagccgggcgtggtggcgggcgcctgtagtcccagctactcgggaggctgaggcaggagaatggcgtcaacccgggaggcggagcttgcagtgagccgagattgcgccactgcactccagcctgggcgacagagcaagactccgtctcaaaaaaaaaaaaaaaaaaaaaaggcgccttgtggctgcatcctccagaggcagcaaaaactgttctcacatggcagatgcacataaaggggcctgtgctggtttcctctagcccttttagaaggcagtagtccattcgggggcacggggtggaactgtcatgacttgatttccagaagaccccatctctcactactaccacagtggagatttaagtttcaacacatgactttgggggacattcagaccatagcaagcagtgaggagactatcgtaattatccaggcgaaaagtaatcatattcctaggggcggtgagggtggtgtggaaaagcaagcaggaaatggctgagagaattcagaaatagaatgcaaaaggatttgtcggtagtgtgagtactggacacgaagaaatacagggagtcctggatggctctgaaggattcaagcctgtgactgggagggagaatggttctgccatgattagaaaacaggaaaggtggaagggaaagccagggaccttgagtacagttgtgtacctaccaagtgcatggatcaggagggagccctaagttggtatctccagcaaactgttggaaatatacaaatttgagtgggagggagaagtcaaagctggggaagtacatttcagattcacccaaaggtaggagatctttagagtttcaagagtcgatgggatttccaaaggggagaattgtagaaagagatggaaagagatacaagaagaaaatgacagggatgaagagaggagaaaaaaagagtaaaaagagttattcagagatgtcacagggaagaagataagtactgtgtatgcgaaacagtgagaacatttccaaataaaggacatggtaagtgatagtagataccacagacccaagaacagcgtagcccctggggagttcaagagctttctcgctggcaaaggttatttcctgtcaagatgaatgtgtatgcaccaataattattagtattccagaatatcctctctttagcatagtaagtgcttaacagtcacaagcaaaagatttatataaaagaaatgctcatttaatttatttaatcagacattggctaagttattagccgctacctatggctttgtaaaacatgaaaaagttggaggaaatctaatgagggtcttttatctgtaagggaaaggtcatcatgggcatcaagtattgaattttagaaacggtgccacagtgaatagggatatattataactcagattagacttcaaaaggactaatttgcttgggacttccatcatttaaaatcacttgcaataaaactgactacatgaaaagatattaatcacaagctttaatgctattccatcaaattattttaatgggtatatttgaacagaattttaatttttcagatacattttttgtcaatagaaaagagaatttgaaagatgattgtaaaatgttacaaatcaaatttaaatcctgatcttattttcattttctctagcaataaaactaaccagtgatgtgtctgaaatatatactacagcaaactcttgacacagctatgattggaaaatgagacattttggttaatcaaatattattgttaatagtgcagtgctgtctgtcggtctctaatttgtaaaaatcagagaaaaacatggtgaatctttggtgacataagagaagactcacaaatcttcatatcctggggtcagtttttaaagcagtaattacacatgatacaagattatattctaagctctctttttccagtaagaaaagataagtcaatgatgttccataaagctgattcttgtttaatcaatttttaaagtgggggggtaggcggcactgacagcattctttggaaagggaagcaacagaggagaaaggcaggatatttggtgtctgctcacattgggaaatacggggagccaggggtggttaagtccagagaaggctggatgtctgtctgcagggctacatctggaagggcaagggaacagtttccttgttgcctcagagcataggtcatgcagcacaagaggagcatttaggaaatgcagattttttttcaaggcaagacagtgaaaactattcaagaaggtagcaaactactggccctttaatgcttttcttatccttgcaagtgtgcaaggcaagacaggagattgtctgttgtctttcagcttgaatgagattgtgcctcacttactgccgccacaccaaagcctggcgtttattcctgtgcgatcattgtatactagggacgtctaactgtgtcaggaggaaatggcagctgagcccctgtggcctttcacctctagcagtgccacgctgcagcacattggccggctgccatgctcctgcctgcagtcctgccagcagctcttgtgagctgcgactttgcataagtagcttgaatgccatgtgcctcagttttcacatctgtaaaagggagatgataatggtacctatgtcatggctctaaacgcgatcatgcacgtgaaagcagttgaagtcttgcctggcagaagtaaatggtggctgctgctgctgctgctgttgtgattgttgttactcaccaaagagatggttttgtttggtttagatgagctgcttcagaaagagcaaaactattcagatgacgtcttggccaacatgattagtgaaccaaggatcagttacggaaacgatgctctcatgccatctttgaccgaaacgaaaaccaccgtggagctccttcccgtgaatggagagttcagcctggacgatctccagccgtggcattcttttggggctgactctgtgccagccaacacagaaaacgaaggtaagagtcccctgagccagcaagggcgttctgggaggtatatatacacatacataacgtgtgtgcaagagagagagttatcttttgtatgttcttgagtggtgaattttttttgatgtagtcataaatattttcattataattttactttaaaaagtaaatactaggagttactatgtcattaaaataatatatctgtgtaaattattctttatattttttatgctgcaaagcatgtaaactgccaattgttggaaaagacaacaactccattgtataggtggcaaaacaaaatggtaatgatttacataacatttgcaggtaaagggcctcttgtttcgcacatgtccaggtttgcattctagggaatattatccttcgagtgaacactcccggacgaaggggagccacagtgtattattgaagaggcagttcttcacaaggaaaatgtgtggcaataacattcttctaatttttattttccagttcctcttcttaatataaaatggtacattatataacaaaagtggatacataaagagcatgtactgtatatcatattattatgtttatgactttttcaaatgaggaaatggaggcaccaggagactaagttcttaagtgatgacttttggtaggaattttttagaaatgttttttaactgtgaggtatattgttccctctggaatggaagcacaaaattcaacttgtgtttatgacgtaatgacctagaatgccaccttccaaaaaagcagatagatagtgaaataaggaaaaattacagtttaccaacagagaggagttttgagggcctgcagagatgcagatttgacaggcaccaaagtagtcttcactggctacttattcttacatgaaatttcagattgaattaaatgttaaaggcaaagatagagaactacatataaataaaatttaattttgcttaagacttaatttgtgtttagaaaattaaatttaaggcagctgccaaaattaaggagcacattgctctaaatgttttttcctttggtacctcagagaagtaagattcttctctatcaacaaatttgagcagtagatggcatcctttttcacagggatttcttagcagaaacacctgttcaggcaagaatatctttcagcttcttttatctttttctacatgttcagaagtatacaattacacacaaacaccttgatttctagatacaaataacatgttttttaagaacacaacagcactttacctgattttctttatcaaagcagcaaatgttgatggagatttcatatttataatataccttataggccaggcatcgtgggtcacgcctgtaatcgcaggacttagggaggctgaggtgggcagatcgcaaggtcaggagatcgagaccatcctggctaacatggtgaaaccccgtctgtactaaaaatacaaaaaaaagttagccgggcgtggtggcgggcacctgtagtcccagctactcgggaggctgaggcaggagaatggcatgaacccgggaggcggacgtggccagtgagctgagatcacaccactgcactccagcctgggtgacagagcgagactttaaatttaaaaaaaataaataaataaagtaaaaaatatatataccttataacatgcaattagtactaaatctaaatataatattagaccttaagtgtactggacaagttttttctaaagaaccattgcagaaaatatatagactattttcacaatgtgaatcatcaccccaaatttgtttccttaatttgaaaaagggcaccttacagtaatagcaaacagcatgttactgacaatgtaaaaataattaaaactttaccatttatgaaaataattcttaatcacatagaagaaaacaattttagggacagttcattatcaaagacctggaaaactgtcctgttaaatgtattgagtgcagattgttttgtttctttacaggtagatagattttggtcattgaaggtcctcttcattcagtctctaatgagaatttttagtgaaaaatgtccgatctcattttgtaaattgaatgcacgctaaatttgctcttttactaacagcataccttgttgcatcagccttaggagaaaatctgcgtgcacacgtgtgaatgtacacacacacacatacactgtgaacccttggtaattgccaggatgtccatttgagcaaagcccttgattaagtacttctggatacttgacaaacacgcagctattacattgcctaggtctcatgaaaagagctgatattcttgttggatgattctgtttgaacagtagaatctggtataacaattttgggaggcaatagaacttgcagtgtcagagtcttgagttgcagtactcttcattatcagtcccaacattgacatatatatattgattatagcaaacaatttaaaaagccacttaagcaatttttttttttttttttttttttgagacggagtctcgctctgtcgcccaggctggctggagtgcagtggcgcgatctcagctcactgcaaactctgcctcccaggttcatgccattttcttgcttcagcctcccgagtagctgggactataggtacccgccaccacgcccggctaattttttgtatttttactagagatagggtttcaccgtgttagccaggatggtctcgatctcctgacctcgtgatccgcccgcctcagcctcccaaagtgctgggattacaggcatgagccacggcgcccggccccaattggtttttaaataaaatagacggccatcatctcataggatattaaatactaccccatacccctgaactcctgaatgatacagacccgagtttaaattccagccctgctatgtgcttctgagcaagttacttagcctctctggctgcttcctcgtctgtaaaataaggttgacaataattcctaactcagaggtatagtatgagcattaaataagaaggcataaaaaagctcttagcaaaattcctggaacgtagtaaatgtcagtggtagctttttttttttttaatggagccaggatcttattagagagactttatcagcctgtctcaagatgaatcaccttatggcctcaacaatgtatccttaaaataatgaatataataagccatataatgagatacagtcctaaagccgtctctcttctaacaccgtctcccacctctccccagaaacttgttagtctttctttgtacagacatgtgcacacacacacacatacacccaactactgaaaatatctaaaattctcaaaggatttccttttgttcttcatgcagtcctcattatcatagtttcaaatgcttaccaaaaatttgttgtttttcttaagaacaatcagtgaaatccagaggaggttctgatgcccattttttaaatttacattgaagaaaataagcatatcagagttttccaatgtgctgtgatttgccttaacaattttttattctttggttttcacatccacaaaacctaaatgaatggctaggctgaaatgaagctgttgttacagaattgtgctcacagatcgtgaaatgatctggctggaagcattagcgttgatgacatttgtgtttgttctactttttcctgactgcctgagaagggcagccacaaagagcagcatagcatgcagtgactgccagcaagtctttgtggccaacagtctgcctctttgtagataatacctagatataatatgtagataaaataatatttttaaagagacaaagcaggtcttataagacttgtatggatgtatttgcaaaatgtgaagctgccttctagtatatttttaactagctttatagaggcaatgaggaagccaatttaaatgttgaaatttagattaaataaatatttcattaaacttacaaaccagttcttgtcagcctcttatctatatgtaaaactggtgtactgctgattcctcattacctttggcctggtagagagtttgtacaaggcagcacggttaatagttgaggtttattacaaagaataccagaagtaacagactcaaaaatcccagaggtctgaccattctgtttctctcctcttacagcaaaggatttgattcaaagctactgagagcaagagaataactcatttctgcttacattttattttaactctattaaaagttaaagctaagataatgtatttcttgtttttaaattactaaacagccaatgtaagatgttttttagcacttcattgatgaagttactgtctggttaagtaaaggtcaattggaaaaattggaaagtatttgcagtggattgggaaataacacactactttgttttgttggtgtgtattcttttttttcggcaatgatatcataattgccttttaaaaaacttttaatgtctgctccctgagctacttattttttgagcattaatttatactaaatcagcttcaatcttttaaagcagattagggtttatgtcactgaaactagttttgtttaatcttcctaaaaaatagggttagggttttattattgtttttaaataatacatgcctatttaaaaaaatagaagaagaagaagaagagcggggagaggcagagaaacttataggacaatatcatttgtaagtttctttcacataagtatacgcatttgaaccctggaaaaaccatttactttgtgacacaactgaagttcagaaagaatgtgattagccccagatcacagagaaagtaagtggtgacattagcagtggcccgtgggactaccagctcctcagcctgcatttaaaccacaggtacacttaacttactgccccgagttgcatatacattttctaataacgtaactattgatgtatgtgctcaccaccacttcaaggtacgcgtttgccctcgtgcatgtggtctgttgtgttcttaactgcagttgaagcactattgggtccctcatcatcaggaaattctcacaaagtacaatgacctttcaactaactgcattttacaaggagtaatacagttactcattacaggttgctgcaaataggaaaaaaaatgaagtatagaaaaaccaaacctcattgtcgaaatgtatttgggagttgcagaaggaagtgaactatgtcttcctctaatgcactagtgaaatactagagaatagtcactctcgcatcagtagttactatggaatatttaatcataggatatttaatcagtgcagttctgtagtatctggtagggtctcaaacaggctttaaaggttacttatttgttcctcaccataattagaagatgcagatgttaacatttctgtttccatatggagaaacagccacagaagtggcgcatcccaaggccacagacattgtaaatgttgggcccaggcctgggattagatgcctcaccctccttttgactccaccatgctgccagtctctacatgagaaaggaccaaatttttatttcatccaaatatcctagtgctcccggaaatattttcttatattttggagacttggcttactgccactttttttctccctcactgtttctattaacatgtggcatccaaaatcgatttggactgagaatcccacctttgaatgcctggcctgtgtgcatcagtaagctggatggttttgctgaaattgttagaagccatttcatcgagcacaccgtgtctccttcagcacctgtgctcactttgtcttacctttttccctttacacttgccaccttaccaaagcagcttccccctgcacctacctccgtggcttcatttaccctatgaccattattaatcctaaaaacttcacttttgtccccattccttgtttcttcaaacgccagcgtaaaacaaggaagtattttctgagcatcagaagtgctttggaaaggtcagatgatggtgaggaatatcatgctgtccacactgctttctttgggtcggacccagaacacataaaaagggaaaattgtgaacaatggcaaatataaaatgaaatatcctcatttcacacgtttcagctgtatgtcatctgtcaaatggaagccagcctttttgaaaaagtgagaaaaagactgcggtttccctcttctgccctcatactaaggacaaatttgattcactcactaaatggcagattatatagtaaaactttgctctcctgataaattcatatttgcacttcccctggaaatttaacagagtccttttgtagttaattaactgtaaaataagataagattgggcagttgtaaaaggaagtatctttaaggttttctgctaggctgggaatattttatttctaatcaaaagccaagaaactatctctaaactagctcagagggaaatccaccctccccacccctcttctttgatgttgctgcgtatcctggtgagggcttttattagaaaactaaggagcaggactggcacatcaatagcgataagccatttaaagtggtgcccctcctggtcctcgatgctcgggattaactcactgtggttcttttctggctgctccttttttgtaacttgtttattgcatatgcttttttccctgctcgactatgtttgggagccacgacttaccatcttgatttgtcttgtttgctttctgtgtcccttgcttcctgtgcccagttgagcctgttgatgcccgccctgctgccgaccgaggactgaccactcgaccaggtatcagaaccgcttgacttgtgcctctccgcatcttgggcctaagctcgagcagacgttgtctcctttctgcattttaagcctctctcaattgtacttactgcagagtagaatttgaagtgaccttagaaaccaaacttttaaaaattccccttgactattccttactcttcatttcccaagttccgagtgaaatgattttttttgtttctgagctttccctttgaaacctaaaagagagcccttccaaatttgggtttttttttttcttttttctttaaaacaaacaaaacaaaacaaaaacagagacgattatatacagcctgtccttaaaaacagaagcccagatagatgtagactctcaggtgatgacttggataccagtgtgaacatctctcctttcttgtttggtgtccagatgggtaattttctaactgaactgggctcaaacttcaatcagttactgaagtagacatgatttcctgaaaataccagaattggtttctttccagagcccaaaatacatcttctgttttgtgggttgtatgtacttattctcaatgagtggctaaagtaacacaacagatgtggatgcataattttgcacataagccctttttttatgtattacttaaaaatcccattaacactgaaatagacacttctttttttacagtttcacaaacattaagaagaaacacatttttattttatgaataatgtcatagcacagcagaagcatatatgtgcctggtgtctactctatgaacaacctcacccaactgatagtagccagtgctttcagtgaatcaaaaagaggaagaaagttattgaattgacaaatttgtgtattccagggagattttaatcccaaataacacatacttttccatatttattttcttctttatcctcataatgtccccaggcgatagtcaaagaacagggaattaactttctttgaagatattaatacacagaggtcaacctttgctgcctggttcagatacagtcagcagcagaccaggagacccaccctgtccctcacacttccaccacaggctcgagccatgactgcctccaagcacggtcactgatgaagactgagagtctgcctgtggcatcttcatgcctttatgctgtgattaacagtggcagcagagacagtagtgtgacacgtcttgacagctggtctcgttgatttatgaatttctgtctgtaggcttttaaggggaacttaaattatagtgagtcagagacagtttcagttcttctaatgtcctccttattgtcaatgtcatgtaagggaatctcaaggagccaggagttgacattcctgttctgctcagccaacttgtaaggcctcgggctgagggtcagttcagttctaattgcaaccacagccagctcaggttggtcatttgccttgggacttttttcatggtgcttctctttaaaagacatgctcttcatctacaagcataaaatgtaacttagaaagcgctcattcgactcattcaattttatcaaatttctacattgggccaggagagcctatatgttactattgaaacatccaggaccaggtgacactaccagtcaatgtttttttcttttttaaaaaaattgttttttgattttttttttttttttttgagatggagtctcgctgtgtcccccaggctggagtggagtggcacgatctcaactcactgcaacctctgcctcgggggttcaagcaattcttgtgccccagcctctcaagtagctgggactacagatgcgccccaccatgcccagctaatttttttgtattttcagtagagacgggatttcaccatgttggccaggctggtctcgaactactgacctcaggtgatccacccacctcggcatcccaaagtgctgggattacaggcataagcaccatgcccggcctattcttttaaaaaaaattttttttaatctaaatctaacaaaaaggacacctccaaacgctgtcaaacaaaaacagtgtgttttaaaggaagagctagagaatagttaatggtattacactggtgggagaaaaccatccaaaacctttctcataacagtaagaatatgatgtcacttggggatttcacaaagatcaatccactaaattctttctaggtttgaaagaaattaaacggtagggtccctgctctcaggagcttgaggtataatagaaggaattttgcatatttggaaacatgagatggaatttggaagacaaggaaatacaaagcaacattaagtgctaacaagaatgttctgtgatgggaggagatggagtactaacccaggggcatgttaagtagagaacttactggagatgggcttccagagaggttatgaaagatttgaggcacctggattggcaaagaagaagggaacaattctattcagaagagagggtggcctaagccaagcttcctttcatacacagcgtaggcttgggttgcccagtaagatggctaaagttgagaaagaatgctcagatatgaagtgaggaagattctagttaaggtttgtctatgaatagcagtatttactgcacatgtattaagccatgcgtgtgttctgtttttgtgcttgtagtaagtttatcaaacatttgggctaatttccccgtgttttgtagcatagctttggttcttcttcacattttagagaccacccacttgagtctaatgtgccgaattatatctttagcctttccaaacttagaaagccttcccaagattgtcatgccgttcaagtgatggcattgtttttgaataatcactgttgtcctcagaaacaagttaaaaaaaggtttttgtttttcccccacccagtgctttataatcatgactgaggaaaatggcttctccttaactctcatatctaaaaaaacagaatatggtagcttccagcatgcagtgtcaagtagggaccattgtaataacagtggtgatttgggggcatagtggccattatagctcctcctcctggcttacttccaaagaaaaaatagactctgaaggactaattatacagtttgaccagaataaaaaagaaaaacacattagcgagctcttcacatagggtagaaagctaccctttctgttacaattcatcaccacccttctgcagtccaaataaagggaaaccaggtccttgacccgagccatgcaagaggtgtcatgaaggacatacctcccttagcccccacatgaacaaaaggctctgtccactcatcatgacttacaggaagagagagctggagtcaccagggcttagggtgaaatcagcacaactcaagaaagacctctaagtaagcctgcaaaccaaggtccctgccatttatttgaaactactcatcacattttattacatgcattatcaccttattatgaatatttccctatgtgccagcttactgattttgtcttttagtaagatttgcttaatgtaaaaagtcttccctagatgactattcatgctaaacaaacatgaactattatagcaagagctcttctgccaagagcttctcaaactattgagctgtaaacatgaatttatctgtcatgctgacttgataatatgaatttttttttttggaccaccaaaagtattcacagtatcatttcaaaagtagtgtgggcttgtaaagtttttagtggagagctcttggttttgttttttttttttttttttttttaaaacaggatttgtctctgtttccaggctggagaacagtggcatgataccagctcactgcaacccccatttcctgggctaaagctatcctcccacctaagtttcccatgcagctgggattacagggatgtgccaccacacctggctcatttttgtatttttagtagagacagagttttgccatattggctaggctggtctcgaactcctgagttcaaactgtttgcccgcctcagcctcccaaaggctgggattacaggcatgagtcactgcacctggccgagagctcattctttttttttttttttttgagatggagtctcactctgtcgcccaggctggagtgcagtggcacgaatctcggctcactgcaagctctgcctcctgggttcacaccattctcctgcctaagcctctagtagctgggactacaggtgcctgccaccacgtccggctaattttttgtatttttagtagagacggggtttcaccatggtcttgatctcttgacctcgtgatcctcccgcctcggcctcccaaagtgctgggattacaggtgtgagccactgtgcccggccagagctcattctttacttttatttttcagtataaatatttggctccaaaatctaaaagggaagactcttcaaactgttcaagaaagttttcttaaaaatctcagaaatatagttctaacctattgtgttgctagatcttttatttatttatttatttttggagacagagtctcattctgtcacccaggctggagtgcagtggcacaatctcagctcactgcaacctccacctgccgggttcaagcgattcttatgcctcagccttctggagtagctgggattacaggcacccgccaccacacctggctaatttttttttttttttttttttttttttttttgtatttttagtagagacagggtttcaccatgttgaccaggctggtctcaaactcctgacctcaagtgatccacccagcttggcctcccaaagtgctgggattacaggcgtgagccaccgtgcttggcacgttgccagatcttaataacagaaaaggagtgagctctaaagaaatcactggttatataaggatctcagatttaaaagggctatagaaagattaaaatatacagccagtgagaattaagagagttttagcatcactaccctataaaaataagtgtcagaaaggttcgtttcagcagaatgagttgaaacttaaccaaaaaatacttaacaatattaaagtaagaaaataaataagaatagagaactctgtgggtctcgtagcaagaagttgggggttgagggttaggtcattgagaggaccagagttaaagaatgagaaagggaaactgtcccacttccattgtgccttttatgtctatattaaagagaatgaacttctgatgaaaggaaattaaagcccgagatagatcaacatgagaaaagaaagccctagcccattagttacctattgctacgtagcaaataacgcgagaatttagcagcttaaaacaacaagcattagtttcttacagtttttataggtcaggatttgggatgtggtttagctggatggttctggcacagtgtccgtcatgtggttgcagttaagacactgcctgagctaaagtcatctgaaggtttgattggacctggtgggtctgtttccaacgtggctcactcacgtcactgttactaagagacctcagtatcttaccatgtgaactctgtaatgctgcttgagcgtccctacaacatggcatctcgcacccctgcaccaagaggtccaggaaagagattaaggaagttttagtgccttttttggcccagtctcagaagtcatacaccatcacttctatcatgctctgttcactagagcaagtcactacatcccgaccacattcgaaggaagggaatcaagttctccctcttgaaggaaggagtatcagcaaatttgtggatatattttaaactatgacatcttgctacccaagtccaagttcttatgacccagaccaactgcaggctaagagaacttgaaggggaagtagcaccattgcctgtggtctttgtggaaagctgggaaggtagggataggaaaatgaagttctgaatagcaaaaaggagagaagatagcttcacaatctgtaagccaggtatagagtgacattgattgtgggtctcttttcaaataggttatcaagtggaagctttttgaacaattggatgaggaaatggtgctaggtcacaaccagcgtggatttcctaggttttgtcagattatccttaccttctccttgtataggctgtgctcttagactggcacatcatatgctgtggacattgtgcttttcagtgtcagcaagatgtgtcacaagtttcccagaatctcgtagacaagattgaaagagtgattaggccaagagcaggaagtgaattcccctgggagccaaaggaattgggaatgtgtagcccaagtaagacaagaaccagcaggaacatgcctctccttagggtcgtgatacctgttcaaggttttaatgtggaagggaggattaggcttgctctgtgttgaatcaggctcaaaggatggaagttacagggaagctgattctggcttcatgtaaaaaaaggacagtttgggcaggcaaatctatcaaaaaatggagggaaattgatacattcctctatgttcaaacaggaactgacaatctgcccctgggtgggaacacggtagagaagatgacttcaaaagcccttttcatcctaaaattctgatgtttgataattaaatgttatagcatggacactgacatttacattttttacttatgtttttggtttttaaatgactctgcattttgttttaagcttcaaattattatttgaataatgaaattcatcagaacaattagtgttaagaatcatatagcaatttatagaaaaggaagagttcgtaggttataaattctgttagttgctaagaagcatttttaaaattatgtactatagctctttattcagcagacgaaccaattacaatctgtgtaactagaacacttgactaaaattatataatttttacaacgcttcactgcatagatacatgaacataatttatttgtaattggaacaaagccccaaagtagcagttttgttctaccaggtaattaatgctcatttttaaagccttttattattatttctgaagtaatgagtgcacatggaaaaagacacataataggctaaacaataagcccgtaagccaagccaacatattccaggaacaaatccttgccaacctctcaaccaggatttaacttctgcttttcccccattttcaaaaattatagcatgtatttaaaggcagcagaagccttactttcaggtttcccttaccctttcatttctttttgttcaaaataggtagtaattgaagttttaaatatagggtatcatttttctttaagagtcatttatcaattttcttctaacttcaggcctagaaagaagttttgggtaggctttgtcttacagtgttattatttatgagtaaaactaattggttgtcctgcatactttaattatgatgtaatacaggttctgggttgacaaatatcaagacggaggagatctctgaagtgaagatggatgcagaattccgacatgactcaggatatgaagttcatcatcaaaaattggtacgtaaaataatttacctctttccactactgtttgtcttgccaaatgacctattaactctggttcatcctgtgctagaaatcaaattaaggaaaagataaaaatacaatgcttgcctataggattaccatgaaaacatgaagaaaataaataggctaggctgagcgcagtggctcaagcctgtaatcccagcactttgggaggccaaggcgggtggatcacgaggtcagaaattcgagaccagcctggccaatatggtgaaaccccatctctactaaaaatacaaaaaagattagctgggtgtggtggcaaacacctgtagtcccagctgctggggaggctgacgcaggagacttgcttgaacccaggaggtggaggttgcagtgagctgagatcgtgcctaggcgacagagcgagactccatcccaaaaaaaaaaaagaaaagaaagaggctgtatgtatagttctttcagactacaaggcagcaaagttcgtgcatgactcgggacttaaagtggaattaatttcaatatagcagccactttgacttccactgtgttttctgggaaaataggtttacaataggtttatttgaaggatcaaacacatgcatacactgcttggttttacagaacactttatgtggcttaaattcacatccggaactgtcttcctttacccattcatttctcccccagctctttcttttcattccctcccctacctcccatgatttaacttctcttgcaagagtaagatcatggagtgagcaggaccccatgatgttcccgatagtgttattcatcaaaaggtttgtgcaaagaagacagcagcttccttttcagatgaaatcacttttcccccctaatgttagaattggagtaaatcaaaaagccacatctcctttgtggtcagctctagtagttatataaaatcctttaccaaaagcttagaaatggagataaatcaaatcgtggattatgttagggttccatcttatcagtaggtgcagtaagagggttaaattaatgaagacgacaattttatcacattcagtggtggacagaaaaatggtaagaaaatttccatagcaataatacttaaagttatctcaggcacttcttttgttttgttttgtgtgtgtgtgtgtgtgagtgttacttttttccaagcagaaaatgtcttttcaatattcataaagttgataaatcctagtattaatctctaaaagaaacacctccaaattattatttatgccttacttgactccaaataattgtagcaaataaaaaactgacttgggatttggatttgcattcttaactcccatagttctttttttgtagaaagacatttagctttttgaagcatggttttcattggcaagataatctagtatcagttgttataagatcagggtttctcttgatgaggctgttgctgaagaggttaataaaaactggggaaccactaaagagttgaagagttggtggggtagaaagctgacgattaatgtacagatttgcatttgtcggggcctggggcctgtgtcatataagcccatccccacaattacactaacgcctataatgcgacagtgactaatggcagcggcagcaattaggagaatcagctccctctactggactagttaagataatgtattataattagtgcaatgaatattacaaaattacagtattttcttaaaggcacaggcatatgtccagacttgtatttattcctgattacctcacactagtatattagctaattaatgatttgcttttcataaaaatgttgagctagcatatttgtttagtaaagggaataattatgaacaatttctcattttgttataaaccacgagtaaaacacttttagaagttgcttcatttgctatattttatattgcctttccagattgctagtatgttagtttcagcttagaaaaatcagtcatttgactaccttgaggctaaattgaaagaattttttagggaggtacaggcataccttggaaatttcagaacaccacaataaaacaaattttgcaacaaaatgtcacacaaattttttggcttcccagtacatataaaagttatgttggccaggcacggtggctcatgcctgtaatcccagcactttgggaggccaaggcaggtggatcacaaggtcaggaggtcgagagcatcctggccaacatggtgaaatgccatctctactaaaaatacaaaaattagctgcatatggtggcatgtgcctgtagtcccagctactcgggaggctgaggcaagagaatctcttgatcccaggaggcagaggttgcagtgagccgagatcgcactccagcctgggcaacaagagcaagactctgtctcaaaaaaaaaaaaaagtttgtatttacactatactctagtctgttacatgtgcaatagcattatgtctaaaaaaaaaaaaagccatgtatatactttacttttattagtaaaatattttattactaaaaatgctaatgatcatctgagtcttcagcaagtcctaatctttttgctcgtggagaatcttgccttgatgttcactgctgcaggctaatccaggtggtggctgctgaggtttgtggtggctgtggcaatttcctaaaataagacaataatgaagtttgctgcatcgattgactcttcctttcacaaaaagatgtctctgtagcatgtgatgctgtttgatagcattttgctcacagtagaacagctttcaaaattggagtcagtcttcgcaaatctagccactgcttcatcgagtttatgtgatatcctaaatcctttgttgtcatttcaacagtgttcatagcatcttcaccaagagtagattccattgcaagaaaccactttctttgctcatccataagaggtaactcctcatccattcaagtttgatcatgagatggtagcagttcagtcatgtctttaggctccacttctaattctagttctcttgttatttccaccacatctgctgtgacatcctttactgaagtcttgaactcctcaaagtcacccatgagagttggaatcattgtcttccaaactcccgttattgctgatgttttgatctcccatggatcacagatgttcttaatggcatctggaatggtgaatcctttttagaaggtttgcagtttactttgcccagatccattagaggaatcgctatctatggcagtgaatagccctacaaaatatatttgaaatatattttgaaataataagaggctgaaataataagacttgaaagttgatccacaggctgcagaatggatgttgtgttagcaggcatgaaaacaacagtaatctccctgtacctgtccttcagagctcttgggtgactaggtgctttgttagtgagcagtaatattttgaaatgagtcttttctgagcagtaggtctcaacagtgggtttaaaatattcagtaaaccatgctgttaagagatgtgctgtcatcccagttttgttccatttatagagcatgggcacagtagatttagaataattcttaagcgccctaggacttttacaatggtcagtcttggcttcaaaaacaaagtcgccagctgcattagcccctaacaagagagtcagcttgttctttgaagctttgaaggcaggacttctctctagtgatgaaagtcctagatggcattttcttccaaataagtctgtttcatctccactgaaaatctgttatttagtgtagccaccttcatcaggagtcttatctagatcttctggataacttattgcagcttctacatcagcacttgctgcttcaccttgcacttctgtgttatggagatggcttcttcccttaaacctcatgaaatcaacctctcccaacttttttttcttctgcagcttcttcacctctctcatccttcatagaattgaagacagttgtgggccttgttcttgattaggctttggcctaagagaatgttgtggttggtttgatcttccatccagacaactaaaagttttctccgtatcagcaataaggctgttttgctttatcatttgtgtgctcactggagtagcacttttaatctccttcaagagcttttctttgcattcacaacttggctaactggcacaagaatcttggctttcaatatgccttgcccactaagcttaattatttctagcttttgctttaaagtgagagacctgtgactcttcctttcacttgaatacttaagaggccactgtagggttatttactggcccactttcaatattgttgtctctcaagggatagggagcctgggagttgagggggtggagtggccagtttggggggcagacagaacacacacaacatttattgatttagtttgctgtctttatgggcatgtttcatgacactccaaaacaattaaaatagtaacatcaaaggccactgatcacagatcaccaaacagatataataatttttaatgtttgaatatttaaataattaccaaaatgtgacacagacatgaagtgaacctgtgttcactgttggaaaaatggcaccaatagacttgttcgatgcagggttaccagaaacctttttgttttttttttttaaatactatctgtaagcactactgtacaataaagctatgtatgcctgtattttcattaagttgcagagcaaacgtggtaatatttagctttagttttacttcatctggcataagatcaactccttatataacaagatgataaaagttgtggtgtgcttctataatttcattcaagtagataaagttgaaaaataatgacttgcttttataaacagtatgaagcaatgtagtgcagtaaatgaaattttattccttctttacaatgttctcaaaattatttttatgtttaatccaaataaagagcaagaataaagcaacatttcagattttggtttctggagacaatagttagaaagcatgagttatgagtgacttaaaattcttgttgcctgtacttcactttgaaataacattatgctttaaaaagcattacactgctaaaggttaattagaattctgcagaattactatagctaaaagtaggtaacaagatatctttttttctattgtttaactcctttgtttcagaatgcctattcctgtgcattaaaagtgtccctccaaggaaattaggacatctgcagagttgaaaaacacctaagtctcagtcacttagagtcacacatcagggctcagagtgctatgactaggaaaatgctgacctcctttcattagtatgatcgtgcctttccagcttttgatagatccaagcgctatcttcccaccactcaccaaatgttccacctgtcaaagggtttcaggtccctgcagacttcggttttgacctgtggggaaagtagacttcctcgaactggggaagccacatgttgtacatccttctataaactatgattatcattcttagtaggaaaatatgtgatttctttttttttttttttttttaaagtaagcatcaaatatttgaccaaccagttgggcagagaatatactgaaactttttatataacctcatccaaatgtcccctgcatttaagaaatgaaattcttctaattgcgtttataaattgtaaattatattgcatttagaaattaaaattctttttcttaatttgttttcaaggtgttctttgcagaagatgtgggttcaaacaaaggtgcaatcattggactcatggtgggcggtgttgtcatagcgacagtgatcgtcatcaccttggtgatgctgaagaagaaacagtacacatccattcatcatggtgtggtggaggtaggtaaacttgactgcatgtttccaagtgggaattaagactatgagagaattaggcttagctttttgctaagaactagctaagtatctcttttaaaaaacgaatcagtgtgcttccatgatgcttgggttacagttgttctttcttgttttggttttcattcattgcaacttaccgtgaatattctgctcaaggtattgagagtgtgtgttgttatctcaacttacaatttgtgttgaagttatcaaaataatacaaatgataatgcatgactttaaaaaagcatgattactcttagacttttttttttcaaacacaagcaacaaaaaccagtacaagaagttaaaaataaaaatagaagtaggaagttgctttttccaaaaaaactaaacatgtttattcttggatttcttttgtcttaaatagtctggcctctcaatacaaccaggtaatagtaaataatgtgacttttcagtgcagactcttacctttaaagtttctcaggaaatcacactataccaaatggcccaccaaaacatacatgattgttatttgagagttctgcaacctattaccctgcacttccacctgaaatatcttagtttcaaggtgctatactaaaacaagaaagagagaaagaaaatttacgaataagttatttttatgcatttgaaatgccatttggatgggggaaaaagtgttaaaatctcacagtatatgcaactttttaggaaactgtcttgcagagagtatagtgtaaacataacttttatatgcacagggaaactgaaaaatttgtgtgacatttaattgcgatattttaagagttatggaatttttagagctgaaagatttattgatgatgaccaatcaaattgatcttctcatcttgtagatgagggaactgaggccgagacagaagggttcaaattatgcaaggtcaagctcagagtccagatttcccctcatattccccattgctttttttttttttttttgagacagtctcgcgctgttgcccaggctggatcttggctcactgcaacctctgcctcctgggttcaagcaattctcttgtctcagcttcctgagtagctgggactatgggcacacgccaccatgcccggctaatttttgtttttagtagagacagggtttcaccatattggtcaggctggtctcgaactcctgacctcaggtgatccacccgccttggcttcccaaagtgctgggattacaggcgtgagccaccgcgtctggcccccattgctttttccatcagagaaaagtccaggtgtttctagggagttgaagattccactatccccaaggaaatgggctctaaaccattcttgattagaagaggacaggcagagtttaaataaatgaaatttgtggtgaagccagaaatttcattttgctcagcaattaaaacctctgcagactacaacagaagctgctgatggaaattggggtggagcctcatttccccattcatactgacgtggatgagcagtgtgaggaaggaaaccaagagaacagcaggcagcagggtggaaaggaacggactgacccatagatcagagtgtgagcacataaaagcaatgaccccactgtcatgtttggccattgcaccttttgtgatagtatctaagcttatgtccctcaaaacagtgtaagataggttttcattagtatcagcttatttcatttctgctcaaattaatttttaaaaaaatttaattccatatttgagcaaataaagatgtcttcatacttgagtaattcaagaccccttttttgctgctgttgttgttttggtttttttcatggttttgttgttttcttttgttgttgttgtttctttgttttttgagatggagtcttgctctttcacccaggctggagtgcagtggcatgatctccgctcactgcaacctccacctcccaggttcaagcgattctcctacctcactctcagcctcctgagtaactgggattacaggggcataccaccacgcctggctaatttttgtatttttagtagagacagggttttgccatgttggccaggctggtcttgaattcctggcctcaagtgatccgccctccccaacctcccaaggtgctgggattacaggcatgagccaccatgcctggccttcaagagcactttttagtttatttaatataattctctttgttgccggtctgtccgttgaagttgccttctttgatgccagaggccaaagacttggcttcctcgggcttccataacaaagtaacacagatgggtggattaagcaacagaaatttaccctctcacatttctggagtgtaagatcaaggtatcagccaggttggttcctccccaggcatctctccttggtttgcagatgcctgtctgctccctgtatcttcacatgaccttcactctgtttttctgctgtgtcctaacctcttcctacaaggacaccagtcatagtggattaggatcaaccctgatgaccttgtttaactttaataacctcttcgaccctatctgcaaatacagtcacaggtggaggtactggcagcttaggacttcaacatatgaattctagggggacacgttttagcccgtaacagaccccagtgatgctgagcataaaagcaaggcctccacctggagctccttcccctggctgtgcgtgagaccaggtcctacctcagacctaaggaaaaagaatccccaaataggaggctgcgaatctgagtgttgaaaatttccccaaatgaatgagatgtgcagtcggatttgagaatccctgacacatcattttaacactccttccttttagttctccgcgcaagcctcagggagtggaaaatggtatctctcacctcccagataaccggttgccttttaagtgctcttccagctgcctgaattaaaacgctctttttttagtcagtttaccaagcagtgtctcattggacttaaaatgtcagaggagaagttgacactttgacccagattctgacattaatttttaagccaggaggtatccttgcaggagcaaaatcgggaaggatggctgttcagctcttctctcctcattttgctgtctactggagagcaactggaagcctttctagatgaggggctccacctcattcgtgtttgttttgtttatttcctctcagctccttcccctcaagacctttgtgactgtccttcctgaaagcagccctctgtgcagccccatagtgtgtctgtacagcaatgttgaaatagaccacattccgcttttctgtcctcaaaaaagatgtagtttagctgggatggtagaacctgaacacagggagttgcaacccagcctagggatgttcccaggtgagagagcacggtgggctttcagagcaccatttttcttagcattccagcgtctgcacccacagaagtgatgcttctgcaacatcctcttcctaccttaacaggcactctcaccctcaagtacatggaaatacctttatttccggctctggctaaccttcattaatcagtaaccctacttcagtaagaacaaaaatgagtacatcaatatttccagttggactcacctcagtcactcaggacagaataccattgtacttacataccatcgtgcctgaagaagtcatgatgaaagctttggtttccaggagattttttgtttttagagtgaaaaatgcccgcagaagatcacagagataggaaccctaggaaaaaaactcctgagaacaaatgtataaatgaaacaagcctagaacagtcacataccacttcacactggagagaacgttctgagaaatgtggcatggggcggtttgatcgctgtgcaaacatcataaagtacatgtacataaatctagatggtatagcctgctacacacctgggctacacacctacaactattgctcctaggctccacacctgtgcagcatattgctgcactgaatactatagacagttgtaacacactggcagggatttgcgtatctaaacaaactagaaaaggtacagtaaaaaatacggtattatggggccaccatcatatgtttggtctgtcgtggactaaaatgtcattatgtggcccataactgtatttttattggtagagttgttagcatttggaaatgagcacttgctagttgttgtttttttttttttttttttttttcaaataagcaggaaatattgacttactgaatttacttagccataaggccagagagtcactctgtgagccattggccacgctttcccaaggaggtaactgtgccttattggtgcttcaagcagtgaagcaatagccctttattattaccactccccaaatgtgccctccatgtcagaatagccctctggtggctggaaatctcagcactagctgaattaaccaccttgctcctgttttaggacgttcctgcaaagcccactaatcccaggatctgtttagtagcaagcggtacttttctacattcacatacatagacactggatatttaaaaatacgtattgtagctctttctgctactctccccagacatgtcacctttaataaggagaagttgggggcacagcttctctttattataggatgtgaaaaagttttcctctcacagatctgatcacttgaacaccagaagtctccccgcccccacctcctggttatctcattaatgatctaaataagaagagagttccttttatttggcttttatggaggtatggcatatgactttttctaagtaatatgctgtcacactggtgactgtataaaaagatgtccttagaggtcctttcttcccggccagaagctgacccaccaggatacagacgcactgacgttggcattgtagagtagttggagagagtggtcaggttgaatggaaagccacgataaggaaaagtgagggggggtgcagaacctaggagtggcttacagtgagcagcaggaagagaaattggaagatcaaaggaaagcatcaaaaatgatcacaggccaggcgtggtggctcacacctgtaatcccagcatttggggaggccaaggcaggtggatcacttgaggctaggagttcgagtccagcctggccaacatggtgagaccctgtctctaataaaaatacaaaaaattagccaggcgtggtggcatgcgcctgtagtcgcagctactcaggaggctgaggcaggagaatcgcttgaacccaggagatggaggctgcagtgagccaaaatcacgccactgcactccagcctgggtgacagagcaagactgtcttaaaaaaaaaaaaaattatgaagggatagcaaaggagttcctgaacctgcctgaagaattgcttgatgttggccataaacatagtcaactgccttctagttatatataactatagagagatggcatcaaaattaggaaaacaagcatctatacaactaggtagcaggcagttactgggaggttacgagggataagtcactagcttgaaaacttcctattttctttgcttttattttttttttccgcagacttgtggctcctttgatgtgtcacactattgttgtattgttcgccttagttcccttaccctcctttactcgtctggtccatctcaatgacaggattctgtcgtttggcctgactcagtcccttgtataaaaggacatctattaatccacatcctgctggttactgtacataataaaatgtaaacgtggtgtttcctgcctctcctccaagctcacacacccgcatgtaaatactctaggggcaataggaggagacctagaaactaaggtcacccaaatagaatcttgtccctgcaggcggatagctgagctctaaattactctggatacagtgaaggactaaatggttccaatgaatcaagttcagggagaaaagggtcagggggtatggaggttagccaaagagtgtcaaacgttctcctcaaagctattttagaacaaggctggtcaggctatttgggctcagctcttttcagcgtgtgtcataggcagcagccagttgaagccatgccaccatgcagtgcaggggtccaggtctcaggaaggtgcagcgtaccgagagtcacatgaagacctcagatcatttcctgctgctgtgtaatccaggcagtctgggaagagaatgaatattcagtggttgtatgtatgtgtgtcttcatcccagcaagtgacagatgttcctgcccagttggaaaatggaaattctgacttcattgtcttatcattccttccagaacaagcaccatgggctcaaaccctccctggctctgctttaagggaaataatattgtgtctgtgcagaggccctgtctgcacagggtcgtggtagggctggccttcacatggtggcccatgccactgctgtagcttagccatgaggaagagattggtgagcctgctggagaggaaggctacccttacttggtgctcctcctttatccatagacatgagtactcagattttcgcatctagctttcaaggggctggagattaaagatccaatccatactccttggatgcccttttgtcaagataatcccttcttctgtagctcctaagccctctaaggtctgagggccaagctgccccatggcaggaatggcaaaatgtagctgtcctctcagtggcaaaaggtaataggattatcaagtagcaaaacagaagccaagaaaagacaggagagttagaggtctggattgtgcaccagccttggagcctcgcatctctagcagggcactcttaagcgttaggctttggagtttgaagaggagataaacctatcaaattgccaggtgttcccctgcccttgatgcatgcaaatgattgttgacagccagtgtgatggtagatgtgcctcctggaagaaataaaagtataatattccaacaatcaagcagcattgtggcttttttctacaatcagaaacatagcagctttgtgcttgatctcctaagcaagataattttttttaacctgggcattctttgagttctcagtttcgaggtgatggggagcaaaaatgatgcccaagttcaaatggcgtactgctgcagataggctgtctcctggcacacagatttacagagtgaatgaaatctctcattcattggtgctaatctttaaccatggtttttaacttacaagttggaggctaattacacagttaccagttaaagccaggtgacctcatttgttgacaacagtgcacagcaaaggaaagaggagaggataaggaaaatatctgtgatttgctcccagaaggacagtgaagctgagcatccatttgagcagagtcctctgagtactggccttggtcagagcttgttggtgggagtgtgctaaggggagatgcctaggtctgtcattggagtaagctgagggtttggatgcaggggaactcaggcagctctgagccacagggtggtagatgggagggattcacagtggcgcacagtctcttccataaatggaaacgtaagaatcggggcacatggccatggcggctcatgcctgtagtcctagtgctactttaggaggccgaggtaggcggatcacctgaggtcagtttgagaccagcatggccaacatggtgaaaccccatctctactaaaaatacaaaaattagccaggcgtagtggcgggtgcctgtaatcccagctactcgggaggctgaggcaggagaatcacttgaacctgggaggcagaggttgcagtgagccgagattgcctgggcaacaagagcaagactccaactcaaaaaaaatgggcacataatggatggaacattctgtcccaagggatgagggagctgtatatctacctattccagctgccttgggattagccactggtagtcattccacctcactcccagactgaaaagagtcaatcacttcatgaagtggggctatccgaagggaccacaggggacctgattatactgacagatttatttttatttatttactttttttgagacagagtctccctctgttgcccaggccggagtgcagtggcacgatcttggctcactgcagcctcagcctcctgggttcaagcagttcttctgcctcagcctctggagtagctgggactacaggcacgtgctactgtgcctggctaaatttttttgtatttttgttaaagatggggtttcactatgttggccaggcgtgtctcaaactcccgacctcgtgatccacccgccttggcctcccaaaagggctgggattttgagccacctcacctggccttttttttcttggagatggagtctcactctgtctcccaggctggagtgcagtggcacaatcttggctcactgcaaactccaccccccaagttcaagccattctcctgcctccgcctgtggagcagctgggattacaggcgtgcaccaccacgcctggctaatttttgtatttttagtagagacaaggtttcaccatgttggccaggctggtctcaaactcctgacctcaagtgacgcacccacctcaggctcccaaagtgctgggattacaggagtgagccactgcacccggccatattgacagatcttttagtctgaattgttatcagccagtgtggtctagtcatgacatatctagctccatctcgagacctcatgtcttactgctgacactacatcctcgctggtactttttcttccttggcttcaggggcattgctgtgtaggctcagatccatgccagatggggtgtgtagggggaaaagctgcataagggaggaatgtcacttggcaacactcaacaagggggaatgggcctgcagtattctcccagagatgaatgagcagcccattctaggaaatatccctttgaaggaatatcttctctatggtacatccaaacttttctctggaaaacatgcctcttcattctgatgactttctatttattctcttcatcttaccatggttttacaaaagaggaattttaacatactcattcagcagagttaaggacctcctctcttctgcgaacggggagaggtataacaaatatagtaaaacaagaacagccactgcccacgttgtaggggtaagtaccctgcccaacctgcagacagtaaatgccacacacagctctaacagtgacagggggagaaaaacgtcttcagttactggcctgaccttagaggtaaagcaacatattaacagagagggtctgattttaaactttgagctgaacatacttctatagtatcttaattctcagtttttaaaaaattacatcatctagaatggcgtcgtccttgctcttccttttttcttgtgccaaataatagccccctttggtatatgttattgttttaattgattctcaaacctctccttaacattttaacaaacataaaatttgatagaaatgggctagactaaattcagcagtccaggaaatcgagtatttttctacacagatttgagtgtcacccaagatacagtatactttgctgaatctccctccatgatactcttgtggttttatctattttaccaaaacacttccacgtaaaacaggcttccgttgactctgtttgtcctttatggacccaacaggggaggaaaaaataccattgcactgggtttatccacttactgtggagttggggaaccagaaacaaccactggacacgttgcaagcgcgtcaaggtttccaccgccacctggtggctagatggagcacagcatctgtgtaactggtgggcaaaggcgttctgctccaagatgtcaaagtgggggagaaaattatgggtgttctgcaatcttggcaaaagaagagtactgtactccttatctttttactgcttctccatgttcacccttaaaagattgatttttattttttactcagctctcctcttgtttttcaggttgacgccgctgtcaccccagaggagcgccacctgtccaagatgcagcagaacggctacgaaaatccaacctacaagttctttgagcagatgcagaactagacccccgccacagcagcctctgaagttggacagcaaaaccattgcttcactacccatcggtgtccatttatagaataatgtgggaagaaacaaacccgttttatgatttactcattatcgccttttgacagctgtgctgtaacacaagtagatgcctgaacttgaattaatccacacatcagtaatgtattctatctctctttacattttggtctctatactacattattaatgggttttgtgtactgtaaagaatttagctgtatcaaactagtgcatgaatagattctctcctgattatttatcacatagccccttagccagttgtatattattcttgtggtttgtgacccaattaagtcctactttacatatgctttaagaatcgatgggggatgcttcatgtgaacgtgggagttcagctgcttctcttgcctaagtattcctttcctgatcactatgcattttaaagttaaacatttttaagtatttcagatgctttagagagattttttttccatgactgcattttactgtacagattgctgcttctgctatatttgtgatataggaattaagaggatacacacgtttgtttcttcgtgcctgttttatgtgcacacattaggcattgagacttcaagcttttctttttttgtccacgtatctttgggtctttgataaagaaaagaatccctgttcattgtaagcacttttacggggcgggtggggaggggtgctctgctggtcttcaattaccaagaattctccaaaacaattttctgcaggatgattgtacagaatcattgcttatgacatgatcgctttctacactgtattacataaataaattaaataaaataaccccgggcaagacttttctttgaaggatgactacagacattaaataatcgaagtaattttgggtggggagaagaggcagattcaattttctttaaccagtctgaagtttcatttatgatacaaaagaagatgaaaatggaagtggcaatataaggggatgaggaaggcatgcctggacaaacccttcttttaagatgtgtcttcaatttgtataaaatggtgttttcatgtaaataaatacattcttggaggagcaccattgtgctggtgtgaatgattccatagtaacaatcttgaccatttactgacgtacagaccagtgagaagtcttcgcatgttgggtacccacacctgttgtgtcttaattgcaagtctgagtaggaagttggggccaacatgtgtctcccagtgctgggaaaatatttcatagacctaatttacagtctttacttgatctaaaacattttgctgccatattttggccctcaagtttgtcccaaatgagagacaaagggaaaagttccagggaaataaaaattaagacagctgattatctgtaaagcatggtttctcatcctgaacgctactaacattttgcagggaataattccttgttgaagggagttgtcctgaccagtgtaggatatttatttattttatttatgttttttgagagtctcgctctgtcacccaggctggagtgcagtggcacaatctcggctcactgcactccagcctgggagacagacgagactccgtctcaataaataaataaataaataaataaataaataaaaggagggcctggcacgaatgacatgcagggaaggcagtgagcaggtggaggtccctgtactcgttgtggtgccttatctaccaggcggttgagttgacgtctttgtggacagaattcgattacaaaggtgtccgaaagtctccaggtgggggagagttttgtagcgggcataatttgggttgtaaattgactgttgtctcctgagcagtctcctggtgagggagagtttcactggagctttgaaacacatgttagacagccttgccctgtagggagtgtctcgtgaaggagaggtaaacaattataattgcatttctaaagggctaagtaggacatgggaaactggaaaatggagaaaagaagagaaaaaaatagtaactcattctctttttcttagaaaaatgaggatacttggtcacatcctcacatggtgaagaataagatggtctcttcatttcccttcaacactagtcccatcgtgaggctctgccctcatgacctaatctaatcctaactgcctcccaaaggtcccacctccacatcccattattggggattagggtttcaacatagggatttgggggaaacacaaacactcagttcatagtgatatctgactgcgattccaaaggtctgaggacacattggccctgttgtttttgctgtgttgtccttggcctcaggtgaacattttagctttagattgcaacattttaagctaaaaacactaagctagaaaattaaacttatctcgtcacattctgcatggtgaacaaactcaaaactcacctgagtgtatcttgttttcatgagaaaaaatgaccggtcatctcccttgccctgttagggacagttagacatgactgctgtatgaagatatgtacatgttaacaattcatatgtacaagctactgttccattttgcctggcccaaggggaggtagctagctagttggggtagcagggcgaattaaccctaatataatagtacatttctaatgccaccaatgaaatgaaaaccagctctcaaacatggcactatatgggatggcattccaaggccaactcagttacagtaactacagctttaactttgatcattttgttaccagaaaggggtcccaatccagaccccaagacagggttcttggatctcatgcaagaaagaattcaaggcgggtccatagaggaaaaggaaatgaagttttaaagaaagtaggaaaataaagagtggttgctccataggcagagtgaacctaagggctgctggttgcccattttattgttatttcttaattatttactaaacaagggctgaattattcatgcctccccttggtagaccatatagggtaacttcctgatgttgccatggcatttgtaaaccgtcatggctctagtgggagtgtagcagtgaggacaaccagaggtcactctcattgctatcttggttttggtgggttttgaccggcttctttactgcaacttgttttatgagcaaggtctttatgacctgtatcttatgcagacctacaatctcatcctgtgacttagaatgacttaaccctctgggaatgcagcccagtaggtcccagccttattttacccagcccctattcaaaatggagttgctctggttcagacgcctctgacaattttaaagctaatgaaaaaaatgtctagccaaatgtatatatacatacatatataattatgaaaagataatgccttataatcttgattcttaaattgaggtatattgatagtattctcccaatggtctggggattaatcaataggtaatttatacaaaactgaagtgctgccaaatagaattataggagtagctgctgcgcaaaaaagattaatgagatttggggagactttgctgtggctaatatgatgggtcaggaagagtacaatctcagtacaattttaagttgtatttatcttatgaataattgggctattctttcatatgcccaagggccattttatagctctatatttcttttgtgttctgtttggggcttgaagtctctacttctgtatcgggattgcaatgcctgctgtcttactgtttccatttgtctggtaaattttcgttcattcctttatttttagctatttcaattgctgcattttcggtgtgtatcttgtgtgcagcacacagttgagtttttgctatacgagccaatccgaaaataatcttttttaataggcaaattaagccgatctagttttgatataactaccatgtttgatgtcaattctgtcatattttagattgtaattgctgaatgtattatatttactgtgtctatcctcttgcgttttcttttggcttatgaattttgtgtcttttatttatttatttatttatttatttatttatttatttagagacggggtctcactctgtcgcccaggctgcagtgcactggtgtgatctcggctcactgcaacctccacctcccggattcaagcgattctcccgagtagctgggactacaggcacgtgccaccacacccaactacttttttatttttagtagagacggggtttcaccatgttggccaggctggtctcaaactcctgacctcaggtgatccacctgcctcagcctcccaaagtgctggaattacaggtgtgagccaccgcgctgggtcttgtatctttattctaatgggttgcttttatactaatcttctgtagtgctcttactcccttttttttttttttttttttttttttaagacggaagtctggctctgtcgcccaggctggagtgcagtggcgcaatctcggctcactgtaagctctgcctcccgggttcacaccattctcgtgcctcagcctcccaagtaactgggactacaggcacccaccaccacgcccagctaatttttttgtatttttagtagagacggggtttcaccatgttagccaggatggtctcgatctcccgacctcatgatccacctgccgtggcctcccaaagtgctgggattacaggcatgagccactgcgcccggccccttttttctttcttaacctgttactatctgtcttttctagatgatactgattcccacctattacctatatgtcagtcaatggtgttactctacttttccccttttctctcccttctcccacctttttagttgtatttgttctactttatcagtatataatgtttacatatccatgtttttcattaacccatgaacgaactcttacattattctcagctctacagtcaaatatgtgaaatgatctctgttggtccttttgttcccagaaatattctggttgggtgaaactcaccctccagtaaattgctcagcaagagcacgtgtactgtattcctggaattctggtgagtttgaaactgattttctgtgaccttgaaacttgaagagcagcttgtttttccttaggtttcttgaaaatggtgttccagtgttttcttggtttgcatgttatttttgagaaatctgaggccaatctttaattctctttgtaaatattttttgggcctggaagccttgaggattttttttttataagtctaataattttccgagctatctcagaattatttgtggtcagttttcctatataccacactgggccctttcagtgtagagttgactcagttcttttatttctggaactttttcttggattagagttttaaatattctgttatattgtttttcttttcttcaggaacaccaataatacaaatatgcaacctcctttgtctggcttccatttcaactatcttctctggtcctttttattttatctccttttcattctcttggctatccttcttttattcaataccctttattaagtttttatttgaacccattctcttcggggcaccttgtaatctgttctttattactgataaagttttgtgattttcttctattttttttcctgaatttaatcagctctggcttcattttctcctattttttgttgatttctctacctagtttttatatttccgattcaacatattgatattttccatgttcccagatgcaggttggagaatatttcataaatattgagtgttgtcttagaattttcatcaagttcatggttatatcgaggagacatcaccagcagaaaaactttgatttgcaacttctgactttggcagttgttctctatagaagttggtccactccttcctcttcctgttcattctgtgggcaggagacctagttaggagcagcttcttccctcagttcaacaatgttctgtgcagttgcttctgtggctgatgttgacaggaaagatagaagagttgttgtgtctcctattttctgcaggatgcttaattttgttctgtctcctcttctgctgtgcctgtctcccagaagcaccactcctctccctgtgtctgattctccccaacaagcatggattctccatgtctggtctgcacactgtcaggccccactccggagcctgggctctgaactgccaagtgcccatcattgctcgttttttttggttttttttttttttttttttttttgagaccgagtttcactcttgttgccgaggctggagtgcaatggtgcaatcttggctcactgaaacctctacctcctgggttcaagcaattctcctgcctcagcctcctgagtagctgggattacagacgcacgccaccatacccggctaatgtttgtagctttagtagagacgaggtttcaccatgttggccaggaggtctcgaactcctgacctcagatgatccacccacctcggcctcccaaagtgctggaattacaggcgtgagccaccatgcccggccttgttcattctctttgtaaatattgtttcactttatcttttgggagtggctttgtctgttttttctctaagttctctgcttccctccacccttttccccaatctcttgagactcctctcccctgatttctgcacccataggtttgtggtggctgcttgctgcaggcccacagtgggcactctgttggatttttttttcttctatgcacagataattggaaaattgcagcttctcttatctcttagtcatgctgaaagagggacatttaccaccattatgaggaaatctgcacactggtatatttttaaagtgccccagatgattctaatacacagctgtggtggagaacatcttgttatatcatcataatgtgcttttagtacattttacatatattttcccaaaagtcccttggcttcccagccatgactgtctcatttttctcctacctgagtcctgtaggtaagagaagcactgtccttcacatctctgtttctcaaagaattcacctacatcagaatcacctatgagcctggccaaacattgcagttttccagatcccattctgggcctactgagatc

SEQ ID NO: 28777 - DNA, 2565 bp, Homo Sapiens
gtgccgaccaacccccaggatggcggaagctcaccaggccgtggccttccagttcacggtgaccccagacggggtcgacttccggctcagtcgggaggccctgaaacacgtctacctgtctgggatcaactcctggaagaaacgcctgatccgcatcaagaatggcatcctcaggggcgtgtaccctggcagccccaccagctggctggtcgtcatcatggcaacagtgggttcctccttctgcaacgtggacatctccttggggctggtcagttgcatccagagatgcctccctcaggggtgtggcccctaccagaccccgcagacccgggcacttctcagcatggccatcttctccacgggcgtctgggtgacgggcatcttcttcttccgccaaaccctgaagctgcttctctgctaccatgggtggatgtttgagatgcatggcaagaccagcaacttgaccaggatctgggctatgtgtatccgccttctatccagccggcaccctatgctctacagcttccagacatctctgcccaagcttcctgtgcccagggtgtcagccacaattcagcggtacctagagtctgtgcgccccttgttggatgatgaggaatattaccgcatggagttgctggccaaagaattccaggacaagactgcccccaggctgcagaaatacctggtgctcaagtcatggtgggcaagtaactatgtgagtgactggtgggaagagtacatctaccttcgaggcaggagccctctcatggtgaacagcaactattatgtcatggaccttgtgctcatcaagaatacagacgtgcaggcagcccgcctgggaaacatcatccacgccatgatcatgtatcgccgtaaactggaccgtgaagaaatcaagcctgtgatggcactgggcatagtgcctatgtgctcctaccagatggagaggatgttcaacaccactcggatcccgggcaaggacacagatgtgctacagcacctctcagacagccggcacgtggctgtctaccacaagggacgcttcttcaagctgtggctctatgagggcgcccgtctgctcaagcctcaggatctggagatgcagttccagaggatcctggacgacccctccccacctcagcctggggaggagaagctggcagccctcactgcaggaggaagggtggagtgggcgcaggcacgccaggccttctttagctctggaaagaataaggctgccttggaggccatcgagcgtgccgctttcttcgtggccctggatgaggaatcctactcctatgaccccgaagatgaggccagcctcagcctctatggcaaggccctgctacatggcaactgctacaacaggtggtttgacaaatccttcactctcatttccttcaagaatggccagttgggtctcaatgcagagcatgcgtgggcagatgctcccatcattgggcacctctgggagtttgtcctgggcacagacagcttccacctgggctacacggagaccgggcactgcctgggcaaaccgaaccctgcgctcgcacctcctacacggctgcagtgggacattccaaaacagtgccaggcggtcatcgagagttcctaccaggtggccaaggcgttggcagacgacgtggagttgtactgcttccagttcctgccctttggcaaaggcctcatcaagaagtgccggaccagccctgatgcctttgtgcagatcgcgctgcagctggctcacttccgggacaggggtaagttctgcctgacctatgaggcctcaatgaccagaatgttccgggagggacggactgagactgtgcgttcctgtaccagcgagtccacagcctttgtgcaggccatgatggaggggtcccacacaaaagcagacctgcgagatctcttccagaaggctgctaagaagcaccagaatatgtaccgcctggccatgaccggggcagggatcgacaggcacctcttctgcctttacttggtctccaagtacctaggagtcagctctcctttccttgctgaggtgctctcggaaccctggcgtctctccaccagccagatcccccaatcccagatccgcatgttcgacccagagcagcaccccaatcacctgggcgctggaggtggctttggccctgtagcagatgatggctatggagtttcctacatgattgcaggcgagaacacgatcttcttccacatctccagcaagttctcaagctcagagacgaacgcccagcgctttggaaaccacatccgcaaagccctgctggacattgctgatcttttccaagttcccaaggcctacagctgaagcccttaggtacctgtgttttgtttgggaactcggaggccctccccctcccccagctcagaccacagaggtggcaagagaagggctgaagctggaagactgttcatgagggacttgtgtgacctgctttgaaatgtgtgactctgctgagtgacgtaggctctgagatagctgtccacgcccacgtgtttgcttggaataaatacttgcctcagaaccttcaaaaa

SEQ ID NO: 28778 - DNA, 4363 bp, Homo Sapiens
atgagccggcccccgccgacggggaaaatgcccggcgcccccgagaccgcgccgggggacggggcaggcgcgagccgccagaggaagctggaggcgctgatccgagaccctcgctcccccatcaacgtggagagcttgctggatggcttaaattccttggtccttgatttagattttcctgctttgaggaaaaacaagaacatagataatttcttaaatagatatgagaaaattgtgaaaaaaatcaaaggtctacagatgaaggcagaagactatgatgttgtaaaagttattggaagaggtgcttttggtgaagtgcagttggttcgtcacaaggcatcgcagaaggtttatgctatgaagcttcttagtaagtttgaaatgataaaaagatcagattctgcctttttttgggaagaaagagatattatggcctttgccaatagcccctgggtggttcagcttttttatgcctttcaagatgataggtatctgtacatggtaatggagtacatgcctggtggagaccttgtaaaccttatgagtaattatgatgtgcctgaaaaatgggccaaattttacactgctgaagttgttcttgctctggatgcaatacactccatgggtttaatacacagagatgtgaagcctgacaacatgctcttggataaacatggacatctaaaattagcagattttggcacgtgtatgaagatggatgaaacaggcatggtacattgtgatacagcagttggaacaccggattatatatcacctgaggttctgaaatcacaagggggtgatggtttctatgggcgagaatgtgattggtggtctgtaggtgttttcctttatgagatgctagtgggggatactccattttatgcggattcacttgtaggaacatatagcaaaattatggatcataagaattcactgtgtttccctgaagatgcagaaatttccaaacatgcaaagaatctcatctgtgctttcttaacagatagggaggtacgacttgggagaaatggggtggaagaaatcagacagcatcctttctttaagaatgatcagtggcattgggataacataagagaaacggcagctcctgtagtacctgaactcagcagtgacatagacagcagcaatttcgatgacattgaagatgacaaaggagatgtagaaaccttcccaattcctaaagcttttgttggaaatcagctgcctttcatcggatttacctactatagagaaaatttattattaagtgactctccatcttgtagagaaaatgattccatacaatcaaggaaaaatgaagaaagtcaagagattcagaaaaaactgtatacattagaagaacatcttagcaatgagatgcaagccaaagaggaactggaacagaagtgcaaatctgttaatactcgcctagaaaaaacagcaaaggagctagaagaggagattaccttacggaaaagtgtggaatcagcattaagacagttagaaagagaaaaggcgcttcttcagcacaaaaatgcagaatatcagaggaaagctgatcatgaagcagacaaaaaacgaaatttggaaaatgatgttaacagcttaaaagatcaacttgaagatttgaaaaaaagaaatcaaaactctcaaatatccactgagaaagtgaatcaactccagagacaactggatgaaaccaatgctttactgcgaacagagtctgatactgcagcccggttaaggaaaacccaggcagaaagttcaaaacagattcagcagctggaatctaacaatagagatctacaagataaaaactgcctgctggagactgccaagttaaaacttgaaaaggaatttatcaatcttcagtcagctctagaatctgaaaggagggatcgaacccatggatcagagataattaatgatttacaaggtagaatatgtggcctagaagaagatttaaagaacggcaaaatcttactagcgaaagtagaactggagaagagacaacttcaggagagatttactgatttggaaaaggaaaaaagcaacatggaaatagatatgacataccaactaaaagttatacagcagagcctagaacaagaagaagctgaacataaggccacaaaggcacgactagcagataaaaataagatctatgagtccatcgaagaagccaaatcagaagccatgaaagaaatggagaagaagctcttggaggaaagaactttaaaacagaaagtggagaacctattgctagaagctgagaaaagatgttctctattagactgtgacctcaaacagtcacagcagaaaataaatgagctccttaaacagaaagatgtgctaaatgaggatgttagaaacctgacattaaaaatagagcaagaaactcagaagcgctgccttacacaaaatgacctgaagatgcaaacacaacaggttaacacactaaaaatgtcagaaaagcagttaaagcaagaaaataaccatctcatggaaatgaaaatgaacttggaaaaacaaaatgctgaacttcgaaaagaacgtcaggatgcagatgggcaaatgaaagagctccaggatcagctcgaagcagaacagtatttctcaaccctttataaaacacaagttagggagcttaaagaagaatgtgaagaaaagaccaaacttggtaaagaattgcagcagaagaaacaggaattacaggatgaacgggactctttggctgcccaactggagatcaccttgaccaaagcagattctgagcaactggctcgttcaattgctgaagaacaatattctgatttggaaaaagagaagatcatgaaagagctggagatcaaagagatgatggctagacacaaacaggaacttacggaaaaagatgctacaattgcttctcttgaggaaactaataggacactaactagtgatgttgccaatcttgcaaatgagaaagaagaattaaataacaaattgaaagatgttcaagagcaactgtcaagattgaaagatgaagaaataagcgcagcagctattaaagcacagtttgagaagcagctattaacagaaagaacactcaaaactcaagctgtgaataagttggctgagatcatgaatcgaaaagaacctgtcaagcgtggtaatgacacagatgtgcggagaaaagagaaggagaatagaaagctacatatggagcttaaatctgaacgtgagaaattgacccagcagatgatcaagtatcagaaagaactgaatgaaatgcaggcacaaatagctgaagagagccagattcgaattgaactgcagatgacattggacagtaaagacagtgacattgagcagctgcggtcacaactccaagccttgcatattggtctggatagttccagtataggcagtggaccaggggatgctgaggcagatgatgggtttccagaatcaagattagaaggatggctttcattgcctgtacgaaacaacactaagaaatttggatgggttaaaaagtatgtgattgtaagcagtaagaagattcttttctatgacagtgaacaagataaagaacaatccaatccttacatggttttagatatagacaagttatttcatgtccgaccagttacacagacagatgtgtatagagcagatgctaaagaaattccaaggatattccagattctgtatgccaatgaaggagaaagtaagaaggaacaagaatttccagtggagccagttggagaaaaatctaattatatttgccacaagggacatgagtttattcctactctttatcatttcccaaccaactgtgaggcttgtatgaagcccctgtggcacatgtttaagcctcctcctgctttggagtgccgccgttgccatattaagtgtcataaagatcatatggacaaaaaggaggagattatagcaccttgcaaagtatattatgatatttcaacggcaaagaatctgttattactagcaaattctacagaagagcagcagaagtgggttagtcggttggtgaaaaagatacctaaaaagcccccagctccagacccttttgcccgatcatctcctagaacttcaatgaagatacagcaaaaccagtctattagacggccaagtcgacagcttgccccaaacaaacctagctaactgccttctatgaaagcagtcattattcaaggtgatcgtattcttccagtgaaaacaagactgaaatatgatgaccccatggtacccggatcctcgaatcttttgctttttaccctggaagaaatactcataagccacctctgtaatcggatccccgggtaccgaaatactcataagccacctctgtaatcggatc

SEQ ID NO: 28779 - DNA, 3088 bp, Homo Sapiens
gctggaagggtttctttggccctgagtgaagagagacccagagggaacactgaggtgcctgcccaaccactctgtcccggtttccttcagcaggaccaggtgagagaagccatgctggtcgttcagatgcctttctcctttcccatggcccacttcatcctctttgtctttacggtttccactatatttcacgttcagcagcggctagcgaagattcaagccatgtgggagttaccggtgcagataccagtgctagcctcaacatcaaaggcactgggacccagccagctcagggggatgtggacgatcaatgcaataggccgcctggggaaccagatgggcgagtacgccacactgtacgccctggccaagatgaacgggcggcccgccttcatcccggcccagatgcacagcaccctggcccccatcttcagaatcaccctgccggtgctgcacagcgccacggccagcaggatcccctggcagaactaccacctgaacgactggatggaggaggaataccgccacttcccgggggagtacgtccgcttcaccggctacccctgctcctggaccttctaccaccacctccgccaggagatcctccaggagttcaccctgcacgaccacgtgcgggaggaggcccagaagttcctgcggggcctgcaggtgaacgggagccggccgggcacctttgtaggggtccatgttcgccgaggggactatgtccatgtcatgccaaaagtgtggaagggggtggtggccgaccggcgatacctacagcaggccctggactggttccgagctcgctacagctccctcatcttcgtggtcaccagtaatggcatggcctggtgtcgggagaacattgacacctcccacggtgatgtggtgtttgctggcgatggcattgagggctcacctgccaaagattttgctctactcacacagtgtaaccacaccatcatgaccattgggacgttcgggatctgggccgcatacctcacgggcggagacaccatctacctggccaattacaccctccccgactcccctttcctcaaaatctttaagccagaggcagccttcctgccggagtggacagggattgccgcagacctgtcccccttactcaagcactaatgctggcccattctttgagaccttttctccttctctgcctccctcaagatgagtgcccgggcatgagaagcacatggttccatgagcaggacccatctctcttctgtgaagatgcgttgggctgcaagtaacagaaatctcagtgaacagtggcctggcgtggtggctcatgcctgtaatgctcgcactttgggaggccagggtgggtggatcacttgaggtcaggagttcaagactagcctggccaacatggtgaaaccccatctcgactaaaaatacaaaaattagccaggcgtggtggtgcacacttgtaatcccagctactcgggaggctgaggcaagagaatcacttgaacccaggaggcggaggttgcagtgagccaagatggtgccgctgcactccagcctgggtgacacagcaagactccatctcaaaaaaaaaaaaagaaaaagaaatgaacgggttcaaagaccataatcatgcatatcacataagaccagaagtggcccaggtccagggtcagttaatttagcagctccacaaagtcatcagtcacctgagctccatccatcttcacatgctgtgctaccatttcttagctgtatcatcccatggtcccaaaagggctgctacacatccagccatcacatgcagataattcctttcaaaaacagcagaaagaggctcgttcttgtcttggtcccttttgaagaatgaatgaaaccttcctaagccttccagcaatttccccccaactccgatgggtaggaattgtcacatacccatgtgacccgataggaggcaaaagaaatgagacttctgggattagtttagcctcagattctgcagctgagaagttgatcagccacctctgaaggacatgcagcttgcagaaaattagggtggtgttaccaaggtgaaaaggggaaatggctttagagtagacaacagagatgccctgaggggttgtgtaggttgttcactgcaggaagtcccctggttaagaaggcaagtggggtttaaacagacccacagtctactcatcaaaccaggtgtccttggcattgtgtccacccagagagctcactgttttcttttctttttcttttctttttttttttttgagatggagtcttgctgcatcccccaggctggagtgcagtggcatgatcttggctcactgcagcctccgcctcccaggttcaggcgattctcctgcctcagcctcccgagtggctgggattgcaggtgcgtgccaccacgcccagctaattttgtacgtttagtggaaatggagtttcaccatgttggtcaggctggtctcaaactcctgacctcatgatccgccttcctcggcctcccaaggtgctgggattacaggtgttagccactgcgcccggccctagagctcactgttttctagttagtccatctggaagtggagcctttttccagtttgcacaaatgtgccatattggcttgtagctggcatgcatccaagtccataggtcctgcctcttcaatcctggctttctagggcctgggatgatcattgctagaactgagagaccagcctggctgagtgaacttcagggcgttccgttcattctttcagtaaatggttgcagcacatgttttacatgtcaggcagtgaaaccccccacagcagccttccctctcagaggatacatttgtaaccattacacagtcatcaaaggaataattttttttaatcaccagtgtgcatacagtcatggagctgggtattcccagctaccagggaggctgaggtgggaggattgcttgatgccaggagttagggaatatagtgcaccgtgattggacttgcgaatagccactgcactgcggcctggacgacgtagtgataccctgactcttataaataaataaatgaataaacacaattatgactttgcggatggg

SEQ ID NO: 28780 - DNA, 3056 bp, Homo Sapiens
cccagctggtgctgaagctcgtcagttcaccatccgccctcggcttccgcggggcgctgggccgccagcctcggcaccgtcctttcctttctccctcgcgttaggcaggtgacagcagggacatgtctcgggagatgcaggatgtagacctcgctgaggtgaagcctttggtggagaaaggggagaccatcaccggcctcctgcaagagtttgatgtccaggagcaggacatcgagactttacatggctctgttcacgtcacgctgtgtgggactcccaagggaaaccggcctgtcatcctcacctaccatgacatcggcatgaaccacaaaacctgctacaaccccctcttcaactacgaggacatgcaggagatcacccagcactttgccgtctgccacgtggacgcccctggccagcaggacggcgcagcctccttccccgcagggtacatgtacccctccatggatcagctggctgaaatgcttcctggagtccttcaacagtttgggctgaaaagcattattggcatgggaacaggagcaggcgcctacatcctaactcgatttgctctaaacaaccctgagatggtggagggccttgtccttatcaacgtgaacccttgtgcggaaggctggatggactgggccgcctccaagatctcaggatggacccaagctctgccggacatggtggtgtcccacctttttgggaaggaagaaatgcagagtaacgtggaagtggtccacacctaccgccagcacattgtgaatgacatgaaccccggcaacctgcacctgttcatcaatgcctacaacagccggcgcgacctggagattgagcgaccaatgccgggaacccacacagtcaccctgcagtgccctgctctgttggtggttggggacagctcgcctgcagtggatgccgtggtggagtgcaactcaaaattggacccaacaaagaccactctcctcaagatggcggactgtggcggcctcccgcagatctcccagccggccaagctcgctgaggccttcaagtacttcgtgcagggcatgggatacatgccctcggctagcatgacccgcctgatgcggtcccgcacagcctctggttccagcgtcacttctctggatggcacccgcagccgctcccacaccagcgagggcacccgaagccgctcccacaccagcgagggcacccgcagccgctcgcacaccagcgagggggcccacctggacatcacccccaactcgggtgctgctgggaacagcgccgggcccaagtccatggaggtctcctgctaggcggcctgcccagctgccgcccccggactctgatctctgtagtggccccctcctccccggccccttttcgccccctgcctgccatactgcgcctaactcggtattaatccaaagcttattttgtaagagtgagctctggtggagacaaatgaggtctattacgtgggtgccctctccaaaggcggggtggcggtggaccaaaggaaggaagcaagcatctccgcatcgcatcctcttccattaaccagtggccggttgccactctcctcccctccctcagagacaccaaactgccaaaaacaagacgcgtagcagcacacacttcacaaagccaagcctaggccgccctgagcatcctggttcaaacgggtgcctggtcagaaggccagccgcccacttcccgtttcctctttaactgaggagaagctgatccagtttccggaaacaaaatccttttctcatttggggaggggggtaatagtgacatgcaggcacctcttttaaacaggcaaaacaggaagggggaaaaggtgggattcatgtcgaggctagaggcatttggaacaacaaatctacgtagttaacttgaagaaaccgatttttaaagttggtgcatctagaaagctttgaatgcagaagcaaacaagcttgatttttctagcatcctcttaatgtgcagcaaaagcaggcaacaaaatctcctggctttacagacaaaaatatttcagcaaacgttgggcatcatggtttttgaaggctttagttctgctttctgcctctcctccacagccccaacctcccacccctgatacatgagccagtgattattcttgttcagggagaagatcatttagatttgttttgcattccttagaatggagggcaacattccacagctgccctggctgtgatgagtgtccttgcaggggccggagtaggagcactggggtgggggcggaattggggttactcgatgtaagggattccttgttgttgtgttgagatccagtgcagttgtgatttctgtggatcccagcttggttccaggaattttgtgtgattggcttaaatccagttttcaatcttcgacagctgggctggaacgtgaactcagtagctgaacctgtctgacccggtcacgttcttggatcctcagaactctttgctcttgtcggggtgggggtgggaactcacgtggggagcggtggctgagaaaatgtaaggattctggaatacatattccatgggactttccttccctctcctgcttcctcttttcctgctccctaacctttcgccgaatggggcagcaccactgacgtttctgggcggccagtgcggctgccaggttcctgtactactgccttgtacttttcattttggctcaccgtggattttctcataggaagtttggtcagagtgaattgaatattgtaagtcagccactgggacccgaggatttctgggaccccgcagttgggaggaggaagtagtccagccttccaggtggcgtgagaggcaatgactcgttacctgccgcccatcaccttggaggccttccctggccttgagtagaaaagtcggggatcggggcaagagaggctgagtacggatgggaaactattgtgcacaagtctttccagaggagtttcttaatgagatatttgtatttatttccagaccaataaatttgtaactttgcagcggaaaaaaaaaaaaaaaaaaaaaaaaaaaaaaaaaaaaaaaaaa

SEQ ID NO: 28781 - DNA, 1777 bp, Homo Sapiens
agttccgcggggggctgtcggggaaccatggctgccccgagagacaatgtcactttattattcaagttatactgcttggcagtgatgaccctgatggctgcagtctataccatagctttaagatacacaaggacatcagacaaagaactctacttttcaacgacagccgtgtgtatcacagaagttataaagttattgctaagtgtgggaattttagctaaagaaactggtagtctgggtagattcaaagcatctttaagagaaaatgtcttggggagccccaaggaactgttgaagttaagtgtgccatcgttagtgtatgctgttcagaacaacatggctttcctagctcttagcaatctggatgcagcagtgtaccaggtgacctaccagttgaagattccgtgtactgctttatgcactgttttaatgttaaatcggacactcagcaaattacagtgggtttcagtttttatgctgtgtgctggagttacgcttgtacagtggaaaccagcccaagctacaaaagtggtggtggaacaaaatccattattagggtttggcgctatagctattgctgtattgtgctcaggatttgcaggagtatattttgaaaaagttttaaagagttcagatacttctctttgggtgagaaacattcaaatgtatctatcagggattattgtgacattagctggcgtctacttgtcagatggagctgaaattaaagaaaaaggatttttctatggttacacatattatgtctggtttgtcatctttcttgcaagtgttggtggcctctacacttctgttgtggttaagtacacagacaacatcatgaaaggcttttctgcagcagcggccattgtcctttccaccattgcttcagtaatgctgtttggattacagataacactcacctttgccctgggtactcttcttgtatgtgtttccatatatctctatggattacccagacaagacactacatccatccaacaaggagaaacagcttcaaaggagagagttattggtgtgtgattttagcctcacgtgagactccttttaagactaaaccatttgcattaaactagagccttaagtcaatctcagaaggtagcataaacaaataaaaattaactgtatggcatgatcagtgcggttatgtggaaacaacaacaaacaaacgaagctatctgagtgaactgctaatacagaaacttaatgtagacctgtttggggtctactattgttttagaatgaaggaattgtattattgtgtgtatatataatttgtaaataaaaagtatggagatgatacggtgttaaaaaaaatcatggtaaggctacaatactcaagtaacaaggtttgggacaatgtctaagggttaaagtgccaaagccatttctgtactaactgttctcttgttccggtaccggggagaaggatgacccctccttattctccaattcatgtacagtattttgtcctagcagcataaagacctagctcttttcttacaagaggcagaaacaagacaggctagttcataaacaaactgtgtaacttctcaaaatgaatctatttcataactcggacaatttctgggtggtgactgagtacccctttagtgagtacccctttagtgctatatttgtgccattcattatctggttcatatttcttttctgttagatgatacacatttcttcaaaaaaatttctaatgtcacttttgtacttttttaaataaagtatgtttaactgttgggctctc

SEQ ID NO: 28782 - DNA, 2682 bp, Homo Sapiens
gaattcgcagcgagagctggaggtgttgggtcgggagaccagccattcgatcccgccgcaggtaggagctggtttccatcctggcaccacggcacacacctccagcctcgagcccggcgctgctgcccgggggtctccttcaggctctttgacgccgttccagggggcacctatccaggcatcctctgggcctctagccagaggactggctcccggcttcagcactccgggctgcagtaagaagtgcccttatcgctctgagccctgccaccatcccgtgaaccaccgaaaccctggtccagcgcgacagccttggacctgggactggacggatccaaaacgctcagcctcggccccccacagacggggctctgcatcgtctctgatatgtcacccaccatctcccacaaggacagcagccggcaacggcggccagggaatttcagtcactctctggatatgaagagcggtcccctgccgccaggcggttgggatgacagtcatttggactcagcgggccgggaaggggacagagaagctcttctgggggataccggcactggcgacttcttaaaagccccacagagcttccgggccgaactaagcagcattttgctactactctttctttacgtgcttcagggtattcccctgggcttggcgggaagcatcccactcattttgcaaagcaaaaatgttagctatacagaccaagctttcttcagttttgtcttttggcccttcagtctcaaattactctgggccccgttggttgatgcggtctacgttaagaacttcggtcgtcgcaaatcttggcttgtcccgacacagtatatactaggactcttcatgatctatttatccactcaggtggaccgtttgcttgggaataccgatgacagaacacccgacgtgattgctctcactgtggcgttctttttgtttgaattcttggccgccactcaggacattgccgtcgatggttgggcgttaactatgttatccagggaaaatgtgggttatgcttctacttgcaattcggtgggccaaacagcgggttactttttgggcaatgttttgtttttggcccttgaatctgccgacttttgtaacaaatatttgcggtttcagcctcaacccagaggaatcgttactctttcagatttcctttttttctggggaactgtatttttaataacaacaacattggttgcccttctgaaaaaagaaaacgaagtatcagtagtaaaagaagaaacacaagggatcacagatacttacaagctgctttttgcaattataaaaatgccagcagttctgacattttgccttctgattctaactgcaaagattggtttttcagcagcagatgctgtaacaggactgaaattggtagaagagggagtacccaaagaacatttagccttattggcagttccaatggttcctttgcagataatactgcctctgattatcagcaaatacactgcaggtccccagccattaaacacattttacaaagccatgccctacagattattgcttgggttagaatatgccctactggtttggtggactcctaaagtagaacatcaagggggattccctatatattactatatcgtagtcctgctgagttatgctttacatcaggttacagtgtacagcatgtatgtttctataatggctttcaatgcaaaggttagtgatccacttattggaggaacatacatgacccttttaaataccgtgtccaatctgggaggaaactggccttctacagtagctctttggcttgtagatcccctcacagtaaaagagtgtgtaggagcatcaaaccagaattgtcgaacacctgatgctgttgagctttgcaaaaaactgggtggctcatgtgttacagccctggatggttattatgtggagtccattatttgtgttttcattggatttggttggtggttctttcttggtccaaaatttaaaaagttacaggatgaaggatcatcttcgtggaaatgcaaaaggaacaattaatatatatgctactggacattctagcaaggtaattgtagtttagttttaattcggagagcaatgataatcagtgcacaggagtataaaatattattttaaacagcgaaattaataatataaaatgccaaatggttgaaaaaatagaaacctttctgtatatttgatcatattttttttttgccttgtcaatgtatttaaagtttacttaaggtcaggaaattctaaaacaacttttctggccttgttatttgatgtatatcttttaaatttactgaccaaagcatgttttaagctgcaatgcagtagtcacgggtggtaaccatgtagtcaggtattgttattagtacctatcactgctgagctgtatttaaaattttggtacaatatataaaatggagaagagcttgatattcaggtactaaccacaactagtctgacattgttggcagttaaaatcttattttgaattgtaaattagttaaattttatgtggaatttgctgagaaaagaatatagactactgaaatgtcattttagttatttttcttatgaccacattgtacaaatgaatctgtgttaaaaagactattttaaatgtatttcctgcttttgtaagcattaaagatttgaattccaccacactgg

SEQ ID NO: 28783 - DNA, 4331 bp, Homo Sapiens
atgtcgctgctgcagtctgcgctcgacttcttggcgggtccaggctccctgggcggtgcttccggccgcgaccagagtgacttcgtggggcagacggtggaactgggcgagctgcggctgcgggtgcggcgggtcctggccgaaggagggtttgcatttgtgtatgaagctcaagatgtggggagtggcagagagtatgcattaaagaggctattatccaatgaagaggaaaagaacagagccatcattcaagaagtttgcttcatgaaaaagctttccggccacccgaacattgtccagttttgttctgcagcgtctataggaaaagaggagtcagacacggggcaggctgagttcctcttgctcacagagctctgtaaagggcagctggtggaatttttgaagaaaatggaatctcgaggccccctttcgtgcgacacggttctgaagatcttctaccagacgtgccgcgccgtgcagcacatgcaccggcagaagccgcccatcatccacagggacctcaaggttgagaacttgttgcttagtaaccaagggaccattaagctgtgtgactttggcagtgccacgaccatctcgcactaccctgactacagctggagcgcccagaggcgagccctggtggaggaagagatcacgaggaatacaacaccaatgtatagaacaccagaaatcatagacttgtattccaacttcccgatcggcgagaagcaggatatctgggccctgggctgcatcttgtacctgctgtgcttccggcagcacccttttgaggatggagcgaaacttcgaatagtcaatgggaagtactcgatccccccgcacgacacgcagtacacggtcttccacagcctcatccgcgccatgctgcaggtgaacccggaggagcggctgtccatcgccgaggtggtgcaccagctgcaggagatcgcggccgcccgcaacgtgaaccccaagtctcccatcacagagctcctggagcagaatggaggctacgggagcgccacactgtcccgagggccaccccctcccgtgggccccgctggcagtggctacagtggaggcctggcgctggcggagtacgaccagccgtatggcggcttcctggacattctgcggggtgggacagagcggctcttcaccaacctcaaggacacctcctccaaggtcatccagtccgtcgctaattatgcaaagggtgacctggacatatcttacatcacatccagaattgcagtgatgtcattcccagcagaaggtgtggagtcagcgctcaaaaacaacatcgaagatgtgcggttgttcctggactccaagcacccagggcactatgccgtctacaacctgtccccgaggacctaccggccctccaggttccacaaccgggtctccgagtgtggctgggcagcacggcgggccccacacctgcacaccctgtacaacatctgcaggaacatgcacgcctggctgcggcaggaccacaagaacgtctgcgtcgtgcactgcatggacgggagagccgcgtctgctgtggccgtctgctccttcctgtgcttctgccgtctcttcagcaccgcggaggccgccgtgtacatgttcagcatgaagcgctgcccaccaggcatctggccatcccacaaaaggtacatcgagtacatgtgtgacatggtggcggaggagcccatcacaccccacagcaagcccatcctggtgagggccgtggtcatgacacccgtgccgctgttcagcaagcagaggagcggctgcaggcccttctgcgaggtctacgtgggggacgagcgtgtggccagcacctcccaggagtacgacaagatgcgggactttaagattgaagatggcaaagcggtgattcccctgggcgtcacggtgcaaggagacgtgctcatcgtcatctatcacgcccggtccactctgggcggccggctgcaggccaagatggcatccatgaagatgttccagattcagttccacacggggtttgtgcctcggaacgccaccactgtgaaatttgccaagtatgacctggacgcgtgtgacattcaagaaaaatacccggatttatttcaagtgaacctggaagtggaggtggagcccagggacaggccgagccgggaagccccaccatgggagaactcgagcatgagggggctgaaccccaaaatcctgttttccagccgggaggagcagcaagacattctgtctaagtttgggaagccggagcttccccggcagcctggctccacggctcagtatgatgctggggcagggtccccggaagccgaacccacagactctgactcaccgccaagcagcagcgcggacgccagtcgcttcctgcacacgctggactggcaggaagagaaggaggcagagactggtgcagaaaatgcctcttccaaggagagcgagtctgccctgatggaggacagagacgagagtgaggtgtcagatgaagggggatccccgatctccagcgagggccaggaacccagggccgacccagagccccccggcctggcagcagggctggtgcagcaggacttggtttttgaggtggagacaccggctgtgctgccagagcctgtgccacaggaagacggggtcgacctcctgggcctgcactccgaggtgggcgcagggccagctgtacccccgcaggcctgcaaggccccctccagcaacaccgacctgctcagctgcctccttgggccccctgaggccgcctcccaggggcccccggaggatctgctcagcgaggacccgctgctcctggcaagcccggcccctcccctgagcgtgcagagcaccccaagaggagggccccctgccgctgctgacccctttggcccgcttctgccgtcttcaggcaacaactcccagccctgctccaatcctgatctcttcggcgaatttctcaattcggactctgtgaccgtcccaccatccttcccgtctgcccacagcgctccgcccccatcctgcagcgccgacttcctgcacctgggggatctgccaggagagcccagcaagatgacagcctcgtccagcaacccagacctgctgggaggatgggctgcctggaccgagactgcagcgtcggcagtggcccccacgccagccacagaaggccccctcttctctcctggaggtcagccggccccttgtggctctcaggccagctggaccaagtctcagaacccggacccatttgctgaccttggcgacctcagctccggcctccaaggctcaccagctggatttcctcctgggggcttcattcccaaaacggccaccacggccaaaggcagcagctcctggcagacaagtcggccgccagcccagggcgcctcatggccccctcaggccaagccgccccccaaagcctgcacacagccaaggcctaactatgcctcgaacttcagtgtgatcggggcgcgggaggagcggggggtccgcgcacccagctttgctcaaaagccaaaagtctctgagaacgactttgaagatctgttgtccaatcaaggcttctcctccaggtctgacaagaaagggccaaagaccattgcagagatgaggaagcaggacctggctaaagacacggacccactcaagctgaagctcctggactggattgagggcaaggagcggaacatccgggccctgctgtccacgctgcacacagtgctgtgggacggggagagccgctggacgcccgtgggcatggccgacctggtggctccggagcaagtgaagaagcactatcgccgcgcggtgctggccgtgcaccccgacaaggctgcggggcagccgtacgagcagcacgccaagatgatcttcatggagctgaatgacgcctggtcggagtttgagaaccagggctcccggcccctcttctgaggccgcagtggtggtggctgcgcacacagctccacaggttgggagccgtcgtgggacctgggtccccaccgtgaggaccccgtgggcgacagcaggtgtggccagggtggggctccgagccccgggtcaccgcccgcccagcgttccaggcacatgaagagaaagcattccaaagcctctgattgttgtttcctttttctcctcccgaaggaacagctgattcatgctcctcccgcaattgtcacgtctgtgatttatttggtgtttcgggcgtggcctctggagccccggcacgtggtgggccacgctgctggcgctcatgggccctggtgtttgcaccgcactttgtaatcagtcccgtggttgtctgtacagaattaaactattttccgatg

SEQ ID NO: 28784 - DNA, 1792 bp, Homo Sapiens
ggcagagggacaacgaccatccggccctagcctggccgggcgggtgccgggagcttccctttctcagcgcggcggaaggtggctcgccgtcagcgcctgcttccctcgacctcgtcctcctccccgctccggacgagccgagatgtggcgcctctgactccacttctccccgcccctgtcaccgagagggggaacgagctctcgcccactcgccggagagacggccctggactcccaaccccgccggcgaaaccatgagctccgtccagcagcagccgccgccgccgcggagggtcaccaacgtggggtccctgttgctcaccccgcaggagaacgagtccctcttcactttcctcggcaagaaatgtgtgactatgtcttcagcagtggtgcagttatatgcagcagatcggaactgtatgtggtcaaagaagtgcagtggtgttgcttgtcttgttaaggacaatccacagagatctcattttttaagaatatttgacattaaggatgggaaactattgtgggaacaagagctatacaataactttgtatataatagtcctagaggatattttcatacctttgctggagatacttgtcaagttgctcttaattttgccaatgaagaagaagcaaaaaaatttcgaaaagcagttacagaccttttgggccgtcgacaaaggaaatctgagaaaagacgagatcccccaaatggtcctaatctacccatggctacagttgatataaaaaatccagaaatcacaacaaatagattttatggtccacaagtcaacaacatctcccataccaaagaaaagaagaagggaaaagctaaaaagaagagattaaccaagggagatataggaacaccaagcaatttccagcacattggacatgttggttgggatccaaatacaggctctgatctgaataatttggatccagaattgaagaatctttttgatatgtgtggaatcttagaggcacaacttaaagaaagagaaacattaaaagttatatatgactttattgaaaaaacaggaggtgttgaagctgttaaaaatgaactgcggaggcaagcaccaccacctccaccaccatcaaggggagggccacctcctcctcctccccctccacatagctcgggtcctcctcctcctcctgctaggggaagaggcgctcctcccccaccaccttcaagagctcccacagctgcacctccaccaccgcctccttccaggccaagtgtagaagtccctccaccaccgccaaataggatgtaccctcctccacctccagcccttccctcctcagcaccttcagggcctccaccaccacctccatctgtgttgggggtagggccagtggcaccacccccaccgcctccacctccacctcctcctgggccaccgcccccgcctggcctgccttctgatggggaccatcaggttccaactactgcaggaaacaaagcagctcttttagatcaaattagagagggtgctcagctaaaaaaagtggagcagaacagtcggccagtgtcctgctctggacgagatgcactgttagaccagatacgacagggtatccaactaaaatctgtggctgatggccaagagtctacaccaccaacacctgcacccacttcaggaattgtgggtgcattaatggaagtgatgcagaaaaggagcaaagccattcattcttcagatgaagatgaagatgaagatgatgaagaagattttgaggatgatgatgagtgggaagactgatctatatattatatatatac

SEQ ID NO: 28785 - DNA, 3002 bp, Homo Sapiens
gccattctctcacatcccgtgcggtcaggaagcccttcctgaactctgacttcagttcttgctgcggtttctgcccatttttttcatatcctctgacagctgcgaggtcatctctgctctggcttttctccaagcagaacaagtgggggctctggaaaggttaagggacctcagtggccaccattatactttgcatctttcctgagaagtgagagttgaaagggaagcaggaaggcccatggtcagattgaaggaaggactttttagtttcttttttttttttttgaaatggagtctcgctctgtcattcaggctggagtgcagtggtgcgatctcagctcactgcagcctccacttcctgggttcacatgattctcctgcctcagcctcccaagtagctgagactacaggcacatgccactacacccagctaacttttgtatttttagtagagacggggtttcaccatgttggccaggctggtctcaaactgctaacatcaagtgatctgctcccctcagcctcccaaagtgctgggattaccggtatgaaccaccacaacctgccaggaatttttagtttttagcttttgcaggagacttcaaggaaaggagacattcctctgtccaggaaacgggtaaggggaccatttctgcattgctggtttcccctcttggcagggtgggcatgaggcatcactgttcctgctccctcactcctgctcctcatgctcagcctgccagctcggcctcaactttgtgtgtctaaagtggaactgaatagtagctgtgagaagataggaaagaggtagtgccaatctccttgcccagatcataaatccagactcagcagggtaaccacatgggcaagcacaaggtaggtgcttggggaaaggggaagtaattggcattctgtgtgataccaaggagaccatttggattttggcttctaccaaagagaatggagaattggttgacctaaatggaaccagtccctttaagtaaggggaggaaagggggtgctggaagatggccctcttcccaccacctagatcatagcttgaactgaagccaaggacagagtgctgcccccttcggcatttactgatgtgccctctttaaatcatgatgttatctaacccaaacccagacccaggacctagtcacagctccaacctacacttcctattaatcttaaaacaaagcgaaacaaacacaaaaagatatcagcattgtagcctccaatctgagcccatttcccttctctggctaccatacctccttctcctatatgataccattcactactttgttcaattatccagtctagacctgcatcttgaggccacacccagccttctcactccccacacccctctttcctctctcactgctccttcctggtctcttctcatctggccccacctctaaggagtcctcctgccttctgggttgccctggaaaacagactatcccccctcctagtgaagggagtgggtaggggtttcagccccaccctcaggaagatgcgtcttccctgtcctctgctctgtggtacttcctctctggctgatttagcaaacagcacctagacctggggccaggcctttggcagtgggacagatccagggataggctacaccaccctgccctgaccctgggattggcatcagcttccaaccagttcctgccaaagcttgtaagtcctcccgacggccatgaacactacatcttctgcagcacccccctcactaggtgtagagttcatctctctgctggctatcatcctgctgtcagtggcgctggctgtggggcttcccggcaacagctttgtggtgtggagtatcctgaaaaggatgcagaagcgctctgtcactgccctgatggtgctgaacctggccctggccgacctggccgtattgctcactgctccctttttccttcacttcctggcccaaggcacctggagttttggactggctggttgccgcctgtgtcactatgtctgcggagtcagcatgtacgccagcgtcctgcttatcacggccatgagtctagaccgctcactggcggtggcccgcccctttgtgtcccagaagctacgcaccaaggcgatggcccggcgggtgctggcaggcatctgggtgttgtcctttctgctggccacacccgtcctcgcgtaccgcacagtagtgccctggaaaacgaacatgagcctgtgcttcccgcggtaccccagcgaagggcaccgggccttccatctaatcttcgaggctgtcacgggcttcctgctgcccttcctggctgtggtggccagctactcggacatagggcgtcggctacaggcccggcgcttccgccgcagccgccgcaccggccgcctggtggtgctcatcatcctgaccttcgccgccttctggctgccctaccacgtggtgaacctggctgaggcgggccgcgcgctggccggccaggccgccgggttagggctcgtggggaagcggctgagcctggcccgcaacgtgctcatcgcactcgccttcctgagcagcagcgtgaaccccgtgctgtacgcgtgcgccggcggcggcctgctgcgctcggcgggcgtgggcttcgtcgccaagctgctggagggcacgggttccgaggcgtccagcacgcgccgcgggggcagcctgggccagaccgctaggagcggccccgccgctctggagcccggcccttccgagagcctcactgcctccagccctctcaagttaaacgaactgaactaggcctggtggaaggaggcgcactttcctcctggcagaatgctagctctgagccagttcagtacctggaggaggagcaggggcgtggagggcgtggagggcgtgggagcgtgggaggcgggagtggagtggaagaagagggagagatggagcaaagtgagggccgagtgagagcgtgctccagcctggctcccacaggcagctttaaccattaaaactgaagtctgaa

SEQ ID NO: 28786 - DNA, 2448 bp, Homo Sapiens
atggaaacgggactgggtgctccgctatttaaagcttggctgctgatctcagtttgggggcttggtgtggacccttccctacagattgacgtcttaacagagttagaacttggggagtccacgaccggagtgcgtcaggtcccggggctgcataatgggacgaaagcctttctctttcaagatactcccagaagcataaaagcgtccactgctacagctgaacagttttttcagaagctgagaaataaacatgaatttactattttggtgaccctaaaacagacccacttaaattcaggagttattctctcaattcaccacttggatcacaggtacctggaactggaaagtagtggccatcggaatgaagtcagactgcattatcgctcaggcagtcaccgccctcacacagaagtgtttccttacattttggctgatgacaagtggcacaagctctccttagccatcagtgcttcccatttgattttacacattgactgcaataaaatttatgaaagggtagtagaaaagccctccacagacttgcctctaggcacaacattttggctaggacagagaaataatgcgcatggatattttaagggtataatgcaagatgtccaattacttgtcatgccccagggatttattgctcagtgcccagatcttaatcgcacctgtccaacttgcaatgacttccatggacttgtgcagaaaatcatggagctacaggatattttagccaaaacatcagccaagctgtctcgagctgaacagcgaatgaatagattggatcagtgctattgtgaaaggacttgcaccatgaagggaaccacctaccgagaatttgagtcctggatagacggctgtaagaactgcacatgcctgaatggaaccatccagtgtgaaactctaatctgcccaaatcctgactgcccacttaagtcggctcttgcgtatgtggatggcaaatgctgtaaggaatgcaaatcgatatgccaatttcaaggacgaacctactttgaaggagaaagaaatacagtctattcctcttctggagtatgtgttctctatgagtgcaaggaccagaccatgaaacttgttgagagttcaggctgtccagctttggattgtccagagtctcatcagataaccttgtctcacagctgttgcaaagtttgtaaaggttatgacttttgttctgaaaggcataactgcatggagaattccatctgcagaaatctgaatgacagggctgtttgtagctgtcgagatggttttagggctcttcgagaggataatgcctactgtgaagacatcgatgagtgtgctgaagggcgccattactgtcgtgaaaatacaatgtgtgtcaacaccccgggttcttttatgtgcatctgcaaaactggatacatcagaattgatgattattcatgtacagaacatgatgagtgtatcacaaatcagcacaactgtgatgaaaatgctttatgcttcaacactgttggaggacacaactgtgtttgcaagccgggctatacagggaatggaacgacatgcaaagcattttgcaaagatggctgtaggaatggaggagcctgtattgccgctaatgtgtgtgcctgcccacaaggcttcactggacccagctgtgaaacggacattgatgaatgctctgatggttttgttcaatgtgacagtcgtgctaattgcattaacctgcctggatggtaccactgtgagtgcagagatggctaccatgacaatgggatgttttcaccaagtggagaatcgtgtgaagatattgatgagtgtgggaccgggaggcacagctgtgccaatgataccatttgcttcaatttggatggcggatatgattgtcgatgtcctcatggaaagaattgcacaggggactgcatccatgatggaaaagttaagcacaatggtcagatttgggtgttggaaaatgacaggtgctctgtgtgctcatgtcagaatggattcgttatgtgtcgacggatggtctgtgactgtgagaatcccacagttgatcttttttgctgccctgaatgtgacccaaggcttagtagtcagtgcctccatcaaaatggggaaactttgtataacagtggtgacacctgggtccagaattgtcaacagtgccgctgcttgcaaggggaagttgattgttggcccctgccttgcccagatgtggagtgtgaattcagcattctcccagagaatgagtgctgcccgcgctgtgtcacagacccttgccaggctgacaccatccgcaatgacatcaccaagacttgcctggacgaaatgaatgtggttcgcttcaccgggtcctcttggatcaaacatggcactgagtgtactctctgccagtgcaagaatggccacatctgttgctcagtggatccacagtgccttcaggaactgtga

SEQ ID NO: 28787 - DNA, 162 bp, Homo Sapiens
cagtttctttggcttactgttatgttttcttgaaatacagctggagaagctttaaatgtcattcctggtgctcaggaaaagaaagcacatgccagtttaatgtctcccggtagacgcaaaaggtaaatgctttttaaaggagacaagttacccgtacccatt

SEQ ID NO: 28788 - DNA, 2435 bp, Homo Sapiens
cgccgtcggggcggagcggtgtcgcgaggctgcatcccggccggcggttccggagcctcgcgtctggggaggcgcggcccgggacgctcgagcttagggagatctgccttctggagactgcgccgtcctcccgggagagccagaaagaggacatggctgctgggcagcgggaagcgaggccccaggtgtcactgacgtttgaggatgtggctgtgctgtttacccgagatgagtggagaaagctggccccttctcagagaaacttgtaccgggatgtgatgctggagaactataggaacctggtctcactggggctcccatttaccaaaccaaaagtgatctccctgttgcagcaaggagaagatccctgggaggtggagaaagacggttctggcgtctcctctctaggatcgaagagcagtcataaaaccacaaagtcaacgcaaacacaagactcttcatttcagggactgatactgaaaagatccaacaggaatgtaccttgggatttgaaattagaaaagccttacatatatgaaggcagattagagaaaaagcaggataaaaagggaagttttcagatagtttcagccacccacaaaaaaatccccactatagaaagaagccataaaaatactgaattgagccaaaacttcagcccaaagtcagtgcttattaggcaacagatacttcccagagaaaaaacaccaccaaaatgtgaaatacaaggaaacagcctcaaacagaattcacaattacttaatcaaccaaaaattacagcagataaacgctataaatgtagtctgtgtgaaaaaaccttcattaacacttcatcccttcgtaaacatgagaaaaaccatagtggagagaaactatttaagtgtaaagaatgttcaaaagcctttagccaaagttcagctcttattcaacatcaaataacacatactggagagaaaccctacatatgtaaagaatgtgggaaagcctttactctcagtacatccctttataaacatctaagaacccatactgtggagaaatcctacagatgtaaagaatgtggtaaatccttcagccgaaggtcaggcctttttatacatcaaaaaattcatgctgaagaaaacccttgtaagtataatccgggtaggaaggcatctagttgcagcacatccctttctggatgtcaaagaattcattctagaaagaagtcctacttatgtaatgaatgtggcaacacctttaagtctagctcatcccttcgttatcatcagagaattcacactggagagaagccttttaaatgtagtgaatgtgggagagccttcagccagagtgcctctcttattcaacatgaaagaattcacaccggagaaaagccctatagatgcaatgaatgtgggaaaggctttacttctatttcacgacttaatagacaccgaatcattcatactggagagaagtattataattgtaatgaatgtggtaaagccttaagctcccactcaacacttattattcacgagcgaattcatactggagaaaaaccatgtaaatgtaaagtatgtggaaaagccttcagacagagttcagctctcattcaacatcagagaatgcatactggagaaagaccctataaatgtaacgagtgtgggaaaacattcaggtgtaactcatcacttagtaatcaccagagaattcatactggagagaaaccatatcgatgtgaggaatgtgggatatcttttggccaaagttcagctcttattcagcatcgaaggattcatacaggagaaaaaccctttaaatgtaatacatgtggaaaaacttttagacaaagctcatcacgtattgcacatcagagaattcatactggagagaaaccctatgaatgtaatacatgtgggaaacttttcaaccataggtcatcccttactaatcattataaaattcatatcgaagaggacccctagaaagtagatttgtatgtgtgaaagccttaaaccaaagctcatcgaagaatacatccttgagagagatgtaataaatgtaatggatgtgaaaaaaactgtaataatttagccctcattaggtatttaatcccatggataaacctcagctatataatagatatgaggaaagtgtttgtgcctgtcagacacttaaaaaaataacctgagatgaagaatttacaattgaagacattgactttagccatttgtgaaatgggtttgctttttcccttttcctacagacgtatatgctagatgtcacgtgatcatcagaaacagatatccgagtgggtggggaggtgtgctttagatttctcattagaagaccaccaaactggtaatatttttatagcattttaatagcttgatcaaattgtacctttttagagaaaaggaccaaaataaaagaaaaatgaattatgaact

SEQ ID NO: 28789 - DNA, 2028 bp, Homo Sapiens
agagaagtggataaatcagtgctgctttctttaggacgaaagaagtatggagcagtgggatcactttcacaatcaacaggaggacactgatagctgctccgaatctgtgaaatttgatgctcgctcaatgacagctttgcttcctccgaatcctaaaaacagcccttcccttcaagagaaactgaagtccttcaaagctgcactgattgccctttacctcctcgtgtttgcagttctcatccctctcattggaatagtggcagctcaactcctgaagtgggaaacgaagaattgctcagttagttcaactaatgcaaatgatataactcaaagtctcacgggaaaaggaaatgacagcgaagaggaaatgagatttcaagaagtctttatggaacacatgagcaacatggagaagagaatccagcatattttagacatggaagccaacctcatggacacagagcatttccaaaatttcagcatgacaactgatcaaagatttaatgacattcttctgcagctaagtaccttgttttcctcagtccagggacatgggaatgcaatagatgaaatctccaagtccttaataagtttgaataccacattgcttgatttgcagctcaacatagaaaatctgaatggcaaaatccaagagaataccttcaaacaacaagaggaaatcagtaaattagaggagcgtgtttacaatgtatcagcagaaattatggctatgaaagaagaacaagtgcatttggaacaggaaataaaaggagaagtgaaagtactgaataacatcactaatgatctcagactgaaagattgggaacattctcagaccttgagaaatatcactttaattcaaggtcctcctggacccccgggtgaaaaaggagatcgaggtcccactggagaaagtggtccacgaggatttccaggtccaataggtcctccgggtcttaaaggtgatcggggagcaattggctttcctggaagtcgaggactcccaggatatgccggaaggccaggaaattctggaccaaaaggccagaaaggggaaaaggggagtggaaacacattaactccatttacgaaagttcgactggtcggtgggagcggccctcacgaggggagagtggagatactccacagcggccagtggggtacaatttgtgacgatcgctgggaagtgcgcgttggacaggtcgtctgtaggagcttgggatacccaggtgttcaagccgtgcacaaggcagctcactttggacaaggtactggtccaatatggctgaatgaagtgttttgttttgggagagaatcatctattgaagaatgtaaaattcggcaatgggggacaagagcctgttcacattctgaagatgctggagtcacttgcactttataatgcatcatattttcattcacaactatgaaatcgctgctcaaaaatgattttattaccttgttcctgtaaaatccatttaatcaatatttaagagattaagaatattgcccaaataatattttagattacaggattaatatattgaacaccttcatgcttactattttatgtctatatttaaatcattttaacttctataggtttttaaatggaattttctaatataatgacttatatgctgaattgaacattttgaagtttatagcttccagattacaaaggccaagggtaatagaaatgcataccagtaattggctccaattcataatatgttcaccaggagattacaattttttgctcttcttgtctttgtaatctatttagttgattttaattactttctgaataacggaagggatcagaagatatcttttgtgcctagattgcaaaatctccaatccacacatattgttttaaaataagaatgttatccaactattaagatatctcaatgtgcaataacttgtgtattagatatcaatgttaatgatatgtcttggccactatggaccagggagcttatttttcttgtcatgtactgacaactgtttaattgaatcatgaag

SEQ ID NO: 28790 - DNA, 1775 bp, Homo Sapiens
ggaaaacagcagaggtgacagagcagccgtgctcgaagcgttcctggagcccaagctctcctccacaggtgaagacagggccagcaggagacaccatggggcacctctcagccccacttcacagagtgcgtgtaccctggcaggggcttctgctcacagcctcacttctaaccttctggaacccgcccaccactgcccagctcactactgaatccatgccattcaatgttgcagaggggaaggaggttcttctccttgtccacaatctgccccagcaactttttggctacagctggtacaaaggggaaagagtggatggcaaccgtcaaattgtaggatatgcaataggaactcaacaagctaccccagggcccgcaaacagcggtcgagagacaatataccccaatgcatccctgctgatccagaacgtcacccagaatgacacaggattctacaccctacaagtcataaagtcagatcttgtgaatgaagaagcaactggacagttccatgtatacccggagctgcccaagccctccatctccagcaacaactccaaccctgtggaggacaaggatgctgtggccttcacctgtgaacctgagactcaggacacaacctacctgtggtggataaacaatcagagcctcccggtcagtcccaggctgcagctgtccaatggcaacaggaccctcactctactcagtgtcacaaggaatgacacaggaccctatgagtgtgaaatacagaacccagtgagtgcgaaccgcagtgacccagtcaccttgaatgtcacctatggcccggacacccccaccatttccccttcagacacctattaccgtccaggggcaaacctcagcctctcctgctatgcagcctctaacccacctgcacagtactcctggcttatcaatggaacattccagcaaagcacacaagagctctttatccctaacatcactgtgaataatagtggatcctatacctgccacgccaataactcagtcactggctgcaacaggaccacagtcaagacgatcatagtcactggtaagtaattcctggagcatcaacactaagatctggggtacaagctttctggttttcaaataggagcagagaagaaattttcttttgcagcctgtatccaacaggcacaaacaagtccaaattctcccctgaaccctctcaattcatctgtgcagactctcttccctttgtttttctgatttctcacagctgaccttaggtccagcctggaatgtggggagggggttctctcagccccagaaagccccgtgtagcaggaggggcttcacagagggggaagcagaaagggtcctcaaggtcaatttgcttctgtcactaacatgtccctttctgtaacttcttggccttcttttacctattccatgagatataaggaatatgtgaggttttaaaacagactcacaatagttttccctaaatgagagaaggaaatgcccttcatcagggatgagcagctcagactctgctccctgctctactccggcttgcccggtgattcgtctgccctgacccatgtggggtaggacgcaggtgtgtgcagaaggtgtccaggtggcctgtcatgaatccagctaaatcaagatggcagtcaatggctgggcgctgtggttcatgcctgtgatcccagtactttggaaggccgaggtgagaggatcacctgaggtcaggagttcgagaccagcctgaccaacatggcaaaactccatctctactaaaaatac

SEQ ID NO: 28791 - DNA, 5937 bp, Homo Sapiens
aagggagctcagtaagtcacttctgggcgactgttgttttatttccggtctatgggacccggctgcgatttgctgctgcggacagcagctaccatcactgctgccgccatcatgtcagacacggacagcgacgaagattccgctggaggcggcccattttctttagcgggtttccttttcggcaacatcaatggagccgggcagctggagggggaaagcgtcttggatgatgaatgtaagaagcacttggcaggcttgggggctttggggctgggcagcctgatcactgaactcacggcaaatgaagaattgaccgggactgacggtgccttggtaaatgatgaagggtgggttaggagtacagaagatgctgtggactattcagacatcaatgaggtggcagaagatgaaagccgaagataccagcagacgatggggagcttgcagcccctttgccactcagattatgatgaagatgactatgatgctgattgtgaagacattgattgcaagttgatgcctcctccacctccacccccgggaccaatgaagaaggataaggaccaggattctattactggtgagaaagtggacttcagtagttcctctgactcagaatctgagatgggacctcaggaagcaacacaggcagaatctgaagatggaaagctgacccttccattggctgggattatgcagcatgatgccaccaagctgttgccaagtgtcacagaactttttccagaatttcgacctggaaaggtgttacgttttctacgtctttttggaccagggaagaatgtcccatctgtttggcggagtgctcggagaaagaggaagaagaagcaccgtgagctgatacaggaagagcagatccaggaggtggagtgctcagtagaatcagaagtcagccagaagtctttgtggaactacgactacgctccaccaccacctccagagcagtgtctctctgatgatgaaatcacgatgatggctcctgtggagtccaaattttcccaatcaactggagatatagataaagtgacagataccaaaccaagagtggctgagtggcgttatgggcctgcccgactgtggtatgatatgctgggtgtccctgaagatggcagtgggtttgactatggcttcaaactgagaaagacagaacatgaacctgtgataaaatctagaatgatagaggaatttaggaaacttgaggaaaacaatggcactgatcttctggctgatgaaaacttcctgatggtgacacagctgcattgggaggatgatatcatctgggatggggaggatgtcaaacacaaagggacaaaacctcagcgtgcaagcctggcaggctggcttccttctagcatgactaggaatgcgatggcttacaatgttcagcaaggttttgcagccactcttgatgatgacaaaccttggtactccatttttcccattgacaatgaggatctggtatatggacgctgggaggacaatatcatttgggatgctcaggccatgccccggctgttggaacctcctgttttgacacttgatcccaatgatgagaacctcattttggaaattcctgatgagaaggaagaggccacctctaactccccctccaaggagagtaagaaggaatcatctctgaagaagagtcgaattctcttagggaaaacaggagtcatcaaggaggaaccacagcagaacatgtctcagccagaagtgaaagatccatggaatctctccaatgatgagtattattatcccaagcaacagggtcttcgaggcacctttggagggaatattatccagcattcaattcctgctgtggaattacggcagcccttctttcccacccacatggggcccatcaaactccggcagttccatcgcccacctctgaaaaagtactcatttggtgcactttctcagccaggtccccactcagtccaacctttgctaaagcacatcaaaaaaaaggccaagatgagagaacaagagaggcaagcttcaggtggtggagagatgttttttatgcgcacacctcaggacctcacaggcaaagatggtgatcttattcttgcagaatatagtgaggaaaatggacccttaatgatgcaggttggcatggcaaccaagataaagaactattataaacggaaacctggaaaagatcctggagcaccagattgtaaatatggggaaactgtttactgccatacatctcctttcctgggttctctccatcctggccaattgctgcaagcatttgagaacaacctttttcgtgctccaatttatcttcataagatgccagaaactgatttcttgatcattcggacaagacagggttactatattcgggaattagtggatatttttgtggttggccagcagtgtcccttgtttgaagttcctgggcctaactccaaaagggccaatacgcatattcgagactttctacaggtttttatttaccgccttttctggaaaagtaaagatcggccacggaggatacgaatggaagatataaaaaaagcctttccttcccattcagaaagcagcatccggaagaggctaaagctctgcgctgacttcaaacgcacagggatggactcaaactggtgggtgcttaagtctgattttcgtttaccaacggaagaagagatcagagctatggtgtcaccagagcagtgctgtgcttattatagcatgatagctgcagagcaacgactgaaggatgctggctatggtgagaaatccttttttgctccagaagaagaaaatgaggaagatttccagatgaagattgatgatgaagttcgcactgccccttggaacaccacaagggccttcattgctgccatgaagggcaagtgtctgctagaggtgactggggtggcagatcccacggggtgtggtgaaggattctcctatgtgaagattccaaacaaaccaacacagcagaaggatgataaagaaccgcagccagtgaagaagacagtgacaggaacagatgcagaccttcgtcgcctttccctgaaaaatgccaagcaacttctacgtaaatttggtgtgcctgaggaagagattaaaaagttgtcccgctgggaagtgattgatgtggtgcgcacaatgtcaacagaacaggctcgttctggagaggggcccatgagtaaatttgcccgtggatcaaggttttctgtggctgagcatcaagagcgttacaaagaggaatgtcagcgcatctttgacctacagaacaaggttctgtcatcaactgaagtcttatcaactgacacagacagcagctcagctgaagatagtgactttgaagaaatgggaaagaacattgagaacatgttgcagaacaagaaaaccagctctcagctttcacgtgaacgggaggaacaggagcggaaggaactacagcgaatgctactggcagcaggctcagcagcatccggaaacaatcacagagatgatgacacagcttccgtgactagccttaactcttctgccactggacgctgtctcaagatttatcgcacgtttcgagatgaagaggggaaagagtatgttcgctgtgagacagtccgaaaaccagctgtcattgatgcctatgtgcgcatacggactacaaaagatgaggaattcattcgaaaatttgccctttttgatgaacaacatcgggaagagatgcgaaaagaacggcggaggattcaagagcaactgaggcggcttaagaggaaccaggaaaaggagaagcttaagggtcctcctgagaagaagcccaagaaaatgaaggagcgtcctgacctaaaactgaaatgtggggcatgtggtgccattggacacatgaggactaacaaattctgccccctctattatcaaacaaatgcgccaccttccaaccctgttgccatgacagaagaacaggaggaggagttggaaaagacagtcattcataatgataatgaagaacttatcaaggttgaagggaccaaaattgtcttggggaaacagctaattgagagtgcggatgaggttcgcagaaaatctctggttctcaagtttcctaaacagcagcttcctccaaagaagaaacggcgagttggaaccactgttcactgtgactatttgaatagacctcataagtccatccaccggcgccgcacagaccctatggtgacgctgtcgtccatcttggagtctatcatcaatgacatgagagatcttccaaatacataccctttccacactccagtcaatgcaaaggttgtaaaggactactacaaaatcatcactcggccaatggacctacaaacactccgcgaaaacgtgcgtaaacgcctctacccatctcgggaagagttcagagagcatctggagctaattgtgaaaaatagtgcaacctacaatgggccaaaacactcattgactcagatctctcaatccatgctggatctctgtgatgaaaaactcaaagagaaagaagacaaattagctcgcttagagaaagctatcaaccccttgctggatgatgatgaccaagtggcgttttctttcattctggacaacattgtcacccagaaaatgatggcagttccagattcttggccatttcatcacccagttaataagaaatttgttccagattattacaaagtgattgtcaatccaatggatttagagaccatacgtaagaacatctccaagcacaagtatcagagtcgggagagctttctggatgatgtaaaccttattctggccaacagtgttaagtataatggacctgagagtcagtatactaagactgcccaggagattgtgaacgtctgttaccagacattgactgagtatgatgaacatttgactcaacttgagaaggatatttgtactgctaaagaagcagctttggaggaagcagaattagaaagcctggacccaatgaccccagggccctacacgcctcagcctcctgatttgtatgataccaacacatccctcagtatgtctcgagatgcctctgtatttcaagatgagagcaatatgtctgtcttggatattcccagtgccactccagaaaagcaggtaacacaggaaggtgaagatggagatggtgatcttgcagatgaagaggaaggaactgtacaacagcctcaagccagtgtcctgtatgaggatttgcttatgtctgaaggagaagatgatgaggaagatgctgggagtgatgaagaaggagacaatcctttctctgctatccagctgagtgaaagtggaagtgactctgatgtgggatctggtggaataagacccaaacaaccccgcatgcttcaggagaacacaaggatggacatggaaaatgaagaaagcatgatgtcctatgagggagacggtggggaggcttcccatggtttggaggatagcaacatcagttatgggagctatgaggagcctgatcccaagtcgaacacccaagacacaagcttcagcagcatcggtgggtatgaggtatcagaggaggaagaagatgaggaggaggaagagcagcgctctgggccgagcgtactaagccaggtccacctgtcagaggacgaggaggacagtgaggatttccactccattgctggggacagtgacttggactctgatgaatgaggcttcctttgggcctccttggtcagccttccctgttctccagcctaggtggttcacctttccccaatttgttcatatttgtacagtatctgatcctgaaatcatgaaattaactaacaccttagcctttttaaaagtagtaagtaaatgataataaatcacctctcctaatcttcctggggcaatgtcaccctttgatttaaaacaaagcaaccccctttcccctaccactacggaaaagagcaagctcatttttccgtgtcctcc

SEQ ID NO: 28792 - DNA, 4286 bp, Homo Sapiens
gagacattccggtgggggactctggccagcccgagcaacgtggatcctgagagcactcccaggtaggcatttgccccggtgggacgccttgccagagcagtgtgtggcaggcccccgtggaggatcaacacagtggctgaacactgggaaggaactggtacttggagtctggacatctgaaacttggctctgaaactgcggagcggccaccggacgccttctggagcaggtagcagcatgcagccgcctccaagtctgtgcggacgcgccctggttgcgctggttcttgcctgcggcctgtcgcggatctggggagaggagagaggcttcccgcctgacagggccactccgcttttgcaaaccgcagagataatgacgccacccactaagaccttatggcccaagggttccaacgccagtctggcgcggtcgttggcacctgcggaggtgcctaaaggagacaggacggcaggatctccgccacgcaccatctcccctcccccgtgccaaggacccatcgagatcaaggagactttcaaatacatcaacacggttgtgtcctgccttgtgttcgtgctggggatcatcgggaactccacacttctgagaattatctacaagaacaagtgcatgcgaaacggtcccaatatcttgatcgccagcttggctctgggagacctgctgcacatcgtcattgacatccctatcaatgtctacaagctgctggcagaggactggccatttggagctgagatgtgtaagctggtgcctttcatacagaaagcctccgtgggaatcactgtgctgagtctatgtgctctgagtattgacagatatcgagctgttgcttcttggagtagaattaaaggaattggggttccaaaatggacagcagtagaaattgttttgatttgggtggtctctgtggttctggctgtccctgaagccataggttttgatataattacgatggactacaaaggaagttatctgcgaatctgcttgcttcatcccgttcagaagacagctttcatgcagttttacaagacagcaaaagattggtggctgttcagtttctatttctgcttgccattggccatcactgcatttttttatacactaatgacctgtgaaatgttgagaaagaaaagtggcatgcagattgctttaaatgatcacctaaagcagagacgggaagtggccaaaaccgtcttttgcctggtccttgtctttgccctctgctggcttccccttcacctcagcaggattctgaagctcactctttataatcagaatgatcccaatagatgtgaacttttgagctttctgttggtattggactatattggtatcaacatggcttcactgaattcctgcattaacccaattgctctgtatttggtgagcaaaagattcaaaaactgctttaagtcatgcttatgctgctggtgccagtcatttgaagaaaaacagtccttggaggaaaagcagtcgtgcttaaagttcaaagctaatgatcacggatatgacaacttccgttccagtaataaatacagctcatcttgaaagaagaactattcactgtatttcattttctttatattggaccgaagtcattaaaacaaaatgaaacatttgccaaaacaaaacaaaaaactatgtatttgcacagcacactattaaaatattaagtgtaattattttaacactcacagctacatatgacattttatgagctgtttacggcatggaaagaaaatcagtgggaattaagaaagcctcgtcgtgaaagcacttaattttttacagttagcacttcaacatagctcttaacaacttccaggatattcacacaacacttaggcttaaaaatgagctcactcagaatttctattctttctaaaaagagatttatttttaaatcaatgggactctgatataaaggaagaataagtcactgtaaaacagaacttttaaatgaagcttaaattactcaatttaaaattttaaaatcctttaaaacaacttttcaattaatattatcacactattatcagattgtaattagatgcaaatgagagagcagtttagttgttgcatttttcggacactggaaacatttaaatgatcaggagggagtaacagaaagagcaaggctgtttttgaaaatcattacactttcactagaagcccaaacctcagcattctgcaatatgtaaccaacatgtcacaaacaagcagcatgtaacagactggcacatgtgccagctgaatttaaaatataatacttttaaaaagaaaattattacatcctttacattcagttaagatcaaacctcacaaagagaaatagaatgtttgaaaggctatcccaaaagacttttttgaatctgtcattcacataccctgtgaagacaatactatctacaattttttcaggattattaaaatcttcttttttcactatcgtagcttaaactctgtttggttttgtcatctgtaaatacttacctacatacactgcatgtagatgattaaatgagggcaggccctgtgctcatagctttacgatggagagatgccagtgacctcataataaagactgtgaactgcctggtgcagtgtccacatgacaaaggggcaggtagcaccctctctcacccatgctgtggttaaaatggtttctagcatatgtataatgctatagttaaaatactatttttcaaaatcatacagattagtacatttaacagctacctgtaaagcttattactaatttttgtattatttttgtaaatagccaatagaaaagtttgcttgacatggtgcttttctttcatctagaggcaaaactgctttttgagaccgtaagaacctcttagctttgtgcgttcctgcctaatttttatatcttctaagcaaagtgccttaggatagcttgggatgagatgtgtgtgaaagtatgtacaagagaaaacggaagagagaggaaatgaggtggggttggaggaaacccatggggacagattcccattcttagcctaacgttcgtcattgcctcgtcacatcaatgcaaaaggtcctgattttgttccagcaaaacacagtgcaatgttctcagagtgactttcgaaataaattgggcccaagagctttaactcggtcttaaaatatgcccaaatttttactttgtttttcttttaataggctgggccacatgttggaaataagctagtaatgttgttttctgtcaatattgaatgtgatggtacagtaaaccaaaacccaacaatgtggccagaaagaaagagcaataataattaattcacacaccatatggattctatttataaatcacccacaaacttgttctttaatttcatcccaatcactttttcagaggcctgttatcatagaagtcattttagactctcaattttaaattaattttgaatcactaatattttcacagtttattaatatatttaatttctatttaaattttagattatttttattaccatgtactgaatttttacatcctgataccctttccttctccatgtcagtatcatgttctctaattatcttgccaaattttgaaactacacacaaaaagcatacttgcattatttataataaaattgcattcagtggctttttaaaaaaaatgtttgattcaaaactttaacatactgataagtaagaaacaattataatttctttacatactcaaaaccaagatagaaaaaggtgctatcgttcaacttcaaaacatgtttcctagtattaaggactttaatatagcaacagacaaaattattgttaacatggatgttacagctcaaaagatttataaaagattttaacctattttctcccttattatccactgctaatgtggatgtatgttcaaacaccttttagtattgatagcttacatatggccaaaggaatacagtttatagcaaaacatgggtatgctgtagctaactttataaaagtgtaatataacaatgtaaaaaattatatatctgggaggattttttggttgcctaaagtggctatagttactgattttttattatgtaagcaaaaccaataaaaatttaagtttttttaacaactaccttatttttcactgtacagacactaattcattaaatactaattgattgtttaaaagaaatataaatgtgacaagtggacattatttatgttaaatatacaattatcaagcaagtatgaagttattcaattaaaatgccacatttctggtctctggg

SEQ ID NO: 28793 - DNA, 1389 bp, Homo Sapiens
ctgggtgcagctctcttttcaggagagaaagctctcttggaggagctggaaaggtgcccgactccagccatgctggcgctactgtgttcctgcctgctcctggcagccggtgcctcggacgcctggacgggcgaggactcggcggagcccaactctgactcggcggagtggatccgagacatgtacgccaaggtcacggagatctggcaggaggtcatgcagcggcgggacgacgacggcacgctccacgccgcctgccaggtgcagccgtcggccacgctggacgccgcgcagccccgggtgaccggcgtcgtcctcttccggcagcttgcgccccgcgccaagctcgacgccttcttcgccctggagggcttcccgaccgagccgaacagctccagccgcgccatccacgtgcaccagttcggggacctgagccagggctgcgagtccaccgggccccactacaacccgctggccgtgccgcacccgcagcacccgggcgacttcggcaacttcgcggtccgcgacggcagcctctggaggtaccgcgccggcctggccgcctcgctcgcgggcccgcactccatcgtgggccgggccgtggtcgtccacgctggcgaggacgacctgggccgcggcggcaaccaggccagcgtggagaacgggaacgcgggccggcggctggcctgctgcgtggtgggcgtgtgcgggcccgggctctgggagcgccaggcgcgggagcactcagagcgcaagaagcggcggcgcgagagcgagtgcaaggccgcctgagcgcggcccccacccggcggcggccagggacccccgaggcccccctctgcctttgagcttctcctctgctccaacagacaccttccactctgaggtctcaccttcgcctctgctgaagtctccccgcagccctctccacccagaggtctccctataccgagacccaccatccttccatcctgaggaccgccccaaccctcggagccccccactcagtaggtctgaaggcctccatttgtaccgaaacaccccgctcacgctgacagcctcctaggctccctgaggtacctttccacccagaccctccttccccaccccataagccctgagactcccgcctttgacctgacgatcttcccccttcccgccttcaggttcctcctaggcgctcagaggccgctctggggggttgcctcgagtccccccacccctccccacccaccaccgctcccgcggcaagccagcccgtgcaacggaagccaggccaactgccccgcgtcttcagctgtttcgcatccaccgccaccccactgagagctgctcctttgggggaatgtttggcaacctttgtgttacagattaaaaattcagcaattc

SEQ ID NO: 28794 - DNA, 2655 bp, Homo Sapiens
acaggtgagcttgacctcacagccacacaactttcacagggtgccaatggctggcagatcatctcttcctcctctggggctacccctacctcaaaggaacagagtggcagcagtaccaatggcagcaatggcagtgagtcttccaagaatcgcacagtctctggtgggcagtatgttgtggctgccgctcccaacttacagaaccagcaagttctgacaggactacctggagtgatgcctaatattcagtatcaagtaatcccacagttccagaccgttgatgggcaacagctgcagtttgctgccactggggcccaagtgcagcaggatggttctggtcaaatacagatcataccaggtgcaaaccaacagattatcacaaatcgaggaagtggaggcaacatcattgctgctatgccaaacctactccagcaggctgtccccctccaaggcctggctaataatgtactctcaggacagactcagtatgtgaccaatgtaccagtggccctgaatgggaacatcaccttgctacctgtcaacagcgtttctgcagctaccttgactcccagctctcaggcagtcacgatcagcagctctgggtcccaggagagtggctcacagcctgtcacctcagggactaccatcagttctgccagcttggtatcatcacaagccagttccagctcctttttcaccaatgccaatagctactcaactactactaccaccagcaacatgggaattatgaactttactaccagtggatcatcagggaccaactctcaaggccagacaccccagagggtcagtgggctacaggggtctgatgctctgaacatccagcaaaaccagacatctggaggctcattgcaagcaggccagcaaaaagaaggagagcaaaaccagcagacacagcagcaacaaattcttatccagcctcagctagttcaagggggacaggccctccaggccctccaagcagcaccattgtcagggcagacctttacaactcaagccatctcccaggaaaccctccagaacctccagcttcaggctgttccaaactctggtcccatcatcatccggacaccaacagtggggcccaatggacaggtcagttggcagactctacagctgcagaacctccaagttcagaacccacaagcccaaacaatcaccttagccccaatgcagggtgtttccttggggcagaccagcagcagcaacaccactctcacacccattgcctcagctgcttccattcctgctggcacagtcactgtgaatgctgctcaactctcctccatgccaggcctccagaccattaacctcagtgcattgggtacttcaggaatccaggtgcacccaattcaaggcctgccgttggctatagcaaatgccccaggtgatcatggagctcagcttggtctccatggggctggtggtgatggaatacatgatgacacagcaggtggagaggaaggagaaaacagcccagatgcccaaccccaagccggtcggaggacccggcgggaagcatgcacctgcccctactgtaaagacagtgaaggaaggggctcgggggatcctggcaaaaagaaacagcatatttgccacatccaaggctgtgggaaagtgtatggcaagacctctcacctgcgggcacacttgcgctggcatacaggcgagaggccatttatgtgtacctggtcatactgtgggaaacgcttcacacgttcggatgagctacagaggcacaaacgtacacacacaggtgagaagaaatttgcctgccctgagtgtcctaagcgcttcatgaggagtgaccacctgtcaaaacatatcaagacccaccagaataagaagggaggcccaggtgtagctctgagtgtgggcactttgcccctggacagtggggcaggttcagaaggcagtggcactgccactccttcagcccttattaccaccaatatggtagccatggaggccatctgtccagagggcattgcccgtcttgccaacagtggcatcaacgtcatgcaggtggcagatctgcagtccattaatatcagtggcaatggcttctgagatcaggcacccggggccagagacatatgggccataccccttaaccccgggatgcaaggtagcatgggtccaagagacatggaagagagagccatgaagcattaaaatgcatggtgttgagaagaatcaggagagggatacaagagaggagatggggtcccggcacccatctgtatcatcagtgcctctttgaaggtgggaaacattagtgaaaattctgttggtgccacgctttgatgagcatttgtttgaccccagtttcttcttacacttcttaccccagcctacccttcctgcatttctcttctcagctcttccatgatggattcccccccctttcctaaagccatcatgccttgataaatatatatgatcattgaaatactttttaacaaaaaacagattctatattattatatatatatatatatataaagatatatagagatgcattcacagggttggctggagaggaagaccattctgtgaccaaaataccttggtcattttttttatattgccttatttccctatggctgagccttgttgtgacacatcaagctt

SEQ ID NO: 28795 - DNA, 4201 bp, Homo Sapiens
ggtcgggggatccctccgccgccagcgcgtggtcccggccccctccacccgccgtctcggccgcggccagcagcccctgccccccgggggacgctgacggccgcccggcgcgccgccctagcagacggacagggggcgctgcgcgcggcctggggcaacccgggccacaggggcaggaaagtgagggcccaggtcggcccgggcgtgcaggggccccgggttcgcagcggcggccgcggcagcgatagcggcactagcagcagcgggagtgccgggttgagccgggaagccgatggcggcggctgcggcggctccgattcctcgctgactgcccgtccgccctcctgcatcgagcgccatgttaccgacccaagctggggccgcggcggctctgggccggggctcggccctggggggcagcctgaaccggaccccgacggggcggccgggcggcggcggcgggacacgcggggctaacgggggccgggtccccgggaatggcgcggggctcgggcccggccgcctggagcgggaggctgcggcagcggcggcaaccaccccggcgcccaccgcgggggccctctacagcggcagcgagggcgactcggagtcgggcgaggaggaggagctgggcgccgagcggcgcggcctgaagcggagcctgagcgagatggagatcggtatggtggtcggtgggcccgaggcgtcggcagcggccaccgggggctacgggccggtgagcggcgcggtgagcggggccaagccgggtaagaagacccggggccgcgtgaagatcaagatggagttcatcgacaacaagctgcggcgctacacgaccttcagcaagaggaagacgggcatcatgaagaaggcctatgagctgtccacgctgacagggacacaggtgctgttgctggtggccagtgagacaggccatgtgtatacctttgccacccgaaaactgcagcccatgatcaccagtgagaccggcaaggcactgattcagacctgcctcaactcgccagactctccaccccgttcagaccccacaacagaccagagaatgagtgccactggctttgaagagacagatctcacctaccaggtgtcggagtctgacagcagtggggagaccaaggacacactgaagccggcgttcacagtcaccaacctgccgggtacaacctccaccatccaaacagcacctagcacctctaccaccatgcaagtcagcagcggcccctcctttcccatcaccaactacctggcaccagtgtctgctagtgtcagccccagtgctgtcagcagtgccaatgggactgtgctgaagagtacaggcagcggccctgtctcctctgggggccttatgcagctgcctaccagcttcaccctcatgcctggtggggcagtggcccagcaggtcccagtgcaggccattcaagtgcaccaggccccacagcaagcgtctccctcccgtgacagcagcacagacctcacgcagacctcctccagcgggacagtgacgctgcccgccaccatcatgacgtcatccgtgcccacaactgtgggtggccacatgatgtaccctagcccgcatgcggtgatgtatgcccccacctcgggcctgggtgatggcagcctcaccgtgctgaatgccttctcccaggcaccatccaccatgcaggtgtcacacagccaggtccaggagccaggtggcgtcccccaggtgttcctgacagcatcatctgggacagtgcagatccctgtttcagcagttcagctccaccagatggctgtgatagggcagcaggccgggagcagcagcaacctcaccgagctacaggtggtgaacctggacaccgcccacagcaccaagagtgaatgatccgcccgccgccctggacagatggcccaagggatggcaccacttatttattgttgccttttcacgttttctttacacacacgttgacgggccgcaggagggaggcggggaggaggaacgggcagccacaggactgagccctctcactccagccaaagaaatgggcctgcctgcctccacccgtcctccctcagcctccccttcttcccgccccacctcccatttctgttgctggaggggctgtcctccttcctgggaccccctcgccagcttggctcgatgtttgccatgagtattagcttacccaatgggaccgtgccccacctccccacacacaggccttctgtggggctgggcaccgtgtcctcctctgaggaagcagttggggccctcttgccagcctccttgctgaccccaggtcagccctgtgtctgtcacaggctgggtcaaaagagccctggctctgcccctcagggggccagctggggagatgggggcttcttcctcacactgctgtcctctcccccttcagctcctgagtagctgggcctgtgcactgggcaggttcctggggccgcctgccctgccttgccgctccccttggacctccaggggctcctgggttggagggaaccaccagcgttcccttctcccccttgtcttcccccctctcctcccagctgctttacttaaagttgattttgaactttttatttgaggagacgaagtgaaaacaaatctataaatatatatttttaaaatatttaacttttttttatggcgtttttctcgtccccctccctgcccaaactccccttccctggggagccctcaggctccccagaactggctgggcccctggggacagagccaccccatgagctcggggtccaccagtgtgtgggggagattctgggtttgcccagtcctggattgtttccaggagaaagccgggggaggggccctcaggccattccccaacggggtggggagggtgacccacagctctgggcctctttttgccctttagggctgttgctagggagagggaagagggagaccaaatgtcggggttggggtgggagggcgtcaggcagaggcaactgacttcatttgtgccacacgcatgggcattgcagccttgcgctgtcccaggcatgcagctgcctggggcccaagttgcagtgagcagggtggggtctgggagggggtgagaggcaggaatgggggtcagaagaagtgggagcagcttcttgggctgagtgcagccaaaggggagccagaaatgggcagttctcccagggagtgagcagctactgtaacttttttaaattaagacaaaaagccttgaagaaaatgactttatttttctaagtgtaacctcagtatttatgtaatttgtacaggggccatgccccacccccctcctccccctttggggtagaccttgagggtgggccagcataggggggagggtcttttaccctgtgtcagagcctaccttcaccacctatatccagaaggggagctttttcagaaacagggcagcagtggggtgaaattttcttaacccctaagactgccttcagtaggaacaagctggcttctgtgattaggtgaagggatgggggaagattttatgcacagcctagttatcaaggggatgatttgccgacatgtttgagaaccccctaacctctaaccctcattgctgtcttgccccagtttggggtgccaagatggaagtcacctttctgggctttctcctggagactagctggggcttatgggtggctttcaaggctggggcatggcaaatcaggggccagagagcaggggagcttgggactcaggtctgtaactgcccagccccttttctctgctcttgtttcactccaccatcactcactcactccccactcccccacccatggggaggagacctttgatgaattcttcctctccttcccacaaaagacagacccagtgagtgaatcaggcaaagtgcttataatgtgtgttgtgtgagcgtggccttgggaggacatgcgtgtgtcagggatgagttgaggtgatatttttatgtgcagcgacccttggtgtttcccttcctcggtggctctggggtatgtgtgtgtgggtgtgtgcgcctgagtgagtgtgtgtgcttgaatgtgagtgtgtatgtcagtggtttctacttcccctgggatgctgacccaggaatagtggacatggtcacagtcctatgtacagagctttcttttgtattaaaaaaaaatactctttcaataaatgtatcatttttgtgcacag

SEQ ID NO: 28796 - DNA, 2755 bp, Homo Sapiens
ttaggacggggcgatggcggctgagaggagctgcgcgtgcgcgaacatgtaactggtgggatctgcggcggctcccagatgatggtcgtcctcctgggcgcgacgaccctagtgctcgtcgccgtgggcccatgggtgttgtccgcagccgcaggtggaaaaaatctaaaatctcctcaaaaagtagaggtcgacatcatagatgacaactttatcctgaggtggaacaggagcgatgagtctgtcgggaatgtgactttttcattcgattatcaaaaaactgggatggataattggataaaattgtctgggtgtcagaatattactagtaccaaatgcaacttttcttcactcaagctgaatgtttatgaagaaattaaattgcgtataagagcagaaaaagaaaacacttcttcatggtatgaggttgactcatttacaccatttcgcaaagctcagattggtcctccagaagtacatttagaagctgaagataaggcaatagtgatacacatctctcctggaacaaaagatagtgttatgtgggctttggatggtttaagctttacatatagcttacttatctggaaaaactcttcaggtgtagaagaaaggattgaaaatatttattccagacataaaatttataaactctcaccagagactacttattgtctaaaagttaaagcagcactacttacgtcatggaaaattggtgtctatagtccagtacattgtataaagaccacagttgaaaatgaactacctccaccagaaaatatagaagtcagtgtccaaaatcagaactatgttcttaaatgggattatacatatgcaaacatgacctttcaagttcagtggctccacgcctttttaaaaaggaatcctggaaaccatttgtataaatggaaacaaatacctgactgtgaaaatgtcaaaactacccagtgtgtctttcctcaaaacgttttccaaaaaggaatttaccttctccgcgtacaagcatctgatggaaataacacatctttttggtctgaagagataaagtttgatactgaaatacaagctttcctacttcctccagtctttaacattagatcccttagtgattcattccatatctatatcggtgctccaaaacagtctggaaacacgcctgtgatccaggattatccactgatttatgaaattattttttgggaaaacacttcaaatgctgagagaaaaattatcgagaaaaaaactgatgttacagttcctaatttgaaaccactgactgtatattgtgtgaaagccagagcacacaccatggatgaaaagctgaataaaagcagtgtttttagtgacgctgtatgtgagaaaacaaaaccaggaaatacctctaaaatttggcttatagttggaatttgtattgcattatttgctctcccgtttgtcatttatgctgcgaaagtcttcttgagatgcatcaattatgtcttctttccatcacttaaaccttcttccagtatagatgagtatttctctgaacagccattgaagaatcttctgctttcaacttctgaggaacaaatcgaaaaatgtttcataattgaaaatataagcacaattgctacagtagaagaaactaatcaaactgatgaagatcataaaaaatacagttcccaaactagccaagattcaggaaattattctaatgaagatgaaagcgaaagtaaaacaagtgaagaactacagcaggactttgtatgaccagaaatgaactgtgtcaagtataaggtttttcagcaggagttacactgggagcctgaggtcctcaccttcctctcagtaactacagagaggacgtttcctgtttagggaaagaaaaaacatcttcagatcataggtcctaaaaatacgggcaagctcttaactatttaaaaatgaaattacaggcccgggcacggtggctcacacctgtaatcccagcactttgggaggctgaggcaggcagatcatgaggtcaagagatcgagaccagcctggccaacgtggtgaaaccccatctctactaaaaatacaaaaattagccgggtagtaggtaggcgcgcgcctgttgtcttagctactcaggaggctgaggcaggagaatcgcttgaaaacaggaggtggaggttgcagtgagccgagatcacgccactgcactccagcctggtgacagcgtgagactctttaaaaaaagaaattaaaagagttgagacaaacgtttcctacattcttttccatgtgtaaaatcatgaaaaagcctgtcaccggacttgcattggatgagatgagtcagaccaaaacagtggccacccgtcttcctcctgtgagcctaagtgcagccgtgctagctgcgcaccgtggctaaggatgacgtctgtgttcctgtccatcactgatgctgctggctactgcatgtgccacacctgtctgttcgccattcctaacattctgtttcattcttcctcgggagatatttcaaacatttggtcttttcttttaacactgagggtaggcccttaggaaatttatttaggaaagtctgaacacgttatcacttggttttctggaaagtagcttaccctagaaaacagctgcaaatgccagaaagatgatccctaaaaatgttgagggacttctgttcattcatcccgagaacattggcttccacatcacagtatctacccttacatggtttaggattaaagccaggcaatcttttactatg

SEQ ID NO: 28797 - DNA, 5306 bp, Homo Sapiens
cggggcaggctgctcccggggtaggtgagggaagcgcggaggcggcgcgcgggggcagtggtcggcgagcagcgcggtcctcgctaggggcgcccacccgtcagtctctccggcgcgagccgccgccaccgcccgcgccggagtcaggcccctgggcccccaggctcaagcagcgaagcggcctccgggggacgccgctaggcgagaggaacgcgccggtgcccttgccttcgccgtgacccagcgtgcgggcggcgggatgagagggagccatcgggccgcgccggccctgcggccccgggggcggctctggcccgtgctggccgtgctggcggcggccgccgcggcgggctgtgcccaggcagccatggacgagtgcacggacgagggcgggcggccgcagcgctgcatgcccgagttcgtcaacgccgctttcaacgtgactgtggtggccaccaacacgtgtgggactccgcccgaggaatactgtgtgcagaccggggtgaccggggtcaccaagtcctgtcacctgtgcgacgccgggcagccccacctgcagcacggggcagccttcctgaccgactacaacaaccaggccgacaccacctggtggcaaagccagaccatgctggccggggtgcagtaccccagctccatcaacctcacgctgcacctgggaaaagcttttgacatcacctatgtgcgtctcaagttccacaccagccgcccggagagctttgccatttacaagcgcacacgggaagacgggccctggattccttaccagtactacagtggttcctgcgagaacacctactccaaggcaaaccgcggcttcatcaggacaggaggggacgagcagcaggccttgtgtactgatgaattcagtgacatttctcccctcactgggggcaacgtggccttttctaccctggaaggaaggcccagcgcctataactttgacaatagccctgtgctgcaggaatgggtaactgccactgacatcagagtaactcttaatcgcctgaacacttttggagatgaagtgtttaacgatcccaaagttctcaagtcctattattatgccatctctgattttgctgtaggtggcagatgtaaatgtaatggacacgcaagcgagtgtatgaagaacgaatttgataagctggtgtgtaattgcaaacataacacatatggagtagactgtgaaaagtgtcttcctttcttcaatgaccggccgtggaggagggcaactgcggaaagtgccagtgaatgcctgccctgtgattgcaatggtcgatcccaggaatgctacttcgaccctgaactctatcgttccactggccatgggggccactgtaccaactgccaggataacacagatggcgcccactgtgagaggtgccgagagaacttcttccgccttggcaacaatgaagcctgctcttcatgccactgtagtcctgtgggctctctaagcacacagtgtgatagttacggcagatgcagctgtaagccaggagtgatgggggacaaatgtgaccgttgccagcctggattccattctctcactgaagcaggatgcaggccatgctcttgtgatccctctggcagcatagatgaatgtaatgttgaaacaggaagatgtgtttgcaaagacaatgtcgaaggcttcaattgtgaaagatgcaaacctggattttttaatctggaatcatctaatcctcggggttgcacaccctgcttctgctttgggcattcttctgtctgtacaaacgctgttggctacagtgtttattctatctcctctacctttcagattgatgaggatgggtggcgtgcggaacagagagatggctctgaagcatctctcgagtggtcctctgagaggcaagatatcgccgtgatctcagacagctactttcctcggtacttcattgctcctgcaaagttcttgggcaagcaggtgttgagttatggtcagaacctctccttctcctttcgagtggacaggcgagatactcgcctctctgccgaagaccttgtgcttgagggagctggcttaagagtatctgtacccttgatcgctcagggcaattcctatccaagtgagaccactgtgaagtatgtcttcaggctccatgaagcaacagattacccttggaggcctgctcttaccccttttgaatttcagaagctcctaaacaacttgacctctatcaagatacgtgggacatacagtgagagaagtgctggatatttggatgatgtcaccctggcaagtgctcgtcctgggcctggagtccctgcaacttgggtggagtcctgcacctgtcctgtgggatatggagggcagttttgtgagatgtgcctctcaggttacagaagagaaactcctaatcttggaccatacagtccatgtgtgctttgcgcctgcaatggacacagcgagacctgtgatcctgagacaggtgtttgtaactgcagagacaatacggctggcccgcactgtgagaagtgcagtgatgggtactatggagattcaactgcaggcacctcctccgattgccaaccctgtccgtgtcctggaggttcaagttgtgctgttgttcccaagacaaaggaggtggtgtgcaccaactgtcctactggcaccactggtaagagatgtgagctctgtgatgatggctactttggagaccccctgggtagaaacggccctgtgagactttgccgcctgtgccagtgcagtgacaacatcgatcccaacgcagttggaaattgcaatcgcttgacgggagaatgcctgaagtgcatctataacactgctggcttctattgtgaccggtgcaaagacggattttttggaaatcccctggctcccaatccagcagacaaatgcaaagcctgcaattgcaatccgtatgggaccatgaagcagcagagcagctgtaaccccgtgacggggcagtgtgaatgtttgcctcacgtgactggccaggactgtggtgcttgtgaccctggattctacaatctgcagagtgggcaaggctgtgagaggtgtgactgccatgccttgggctccaccaatgggcagtgtgacatccgcaccggccagtgtgagtgccagcccggcatcactggtcagcactgtgagcgctgtgaggtcaaccactttgggtttggacctgaaggctgcaaaccctgtgactgtcatcctgagggatctctttcacttcagtgcaaagatgatggtcgctgtgaatgcagagaaggctttgtgggaaatcgctgtgaccagtgtgaagaaaactatttctacaatcggtcttggcctggctgccaggaatgtccagcttgttaccggctggtaaaggataaggttgctgatcatagagtgaagctccaggaattagagagtctcatagcaaaccttggaactggggatgagatggtgacagatcaagccttcgaggatagactaaaggaagcagagagggaagttatggacctccttcgtgaggcccaggatgtcaaagatgttgaccagaatttgatggatcgcctacagagagtgaataacactctgtccagccaaattagccgtttacagaatatccggaataccattgaagagactggaaacttggctgaacaagcgcgtgcccatgtagagaacacagagcggttgattgaaatcgcatccagagaacttgagaaagcaaaagtcgctgctgccaatgtgtcagtcactcagccagaatctacaggggacccaaacaacatgactcttttggcagaagaggctcgaaagcttgctgaacgtcataaacaggaagctgatgacattgttcgagtggcaaagacagccaatgatacgtcaactgaggcatacaacctgcttctgaggacactggcaggagaaaatcaaacagcatttgagattgaagagcttaataggaagtatgaacaagcgaagaacatctcacaggatctggaaaaacaagctgcccgagtacatgaggaggccaaaagggccggtgacaaagctgtggagatctatgccagcgtggctcagctgagccctttggactctgagacactggagaatgaagcaaataacataaagatggaagctgagaatctggaacaactgattgaccagaaattaaaagattatgaggacctcagagaagatatgagagggaaggaacttgaagtcaagaaccttctggagaaaggcaagactgaacagcagaccgcagaccaactcctagcccgagctgatgctgccaaggccctcgctgaagaagctgcaaagaagggacgggataccttacaagaagctaatgacattctcaacaacctgaaagattttgataggcgcgtgaacgataacaagacggccgcagaggaggcactaaggaagattcctgccatcaaccagaccatcactgaagccaatgaaaagaccagagaagcccagcaggccctgggcagtgctgcggcggatgccacagaggccaagaacaaggcccatgaggcggagaggatcgcaagcgctgtccaaaagaatgccaccagcaccaaggcagaagctgaaagaacttttgcagaagttacagatctggataatgaggtgaacaatatgttgaagcaactgcaggaagcagaaaaagagctaaagagaaaacaagatgacgctgaccaggacatgatgatggcagggatggcttcacaggctgctcaagaagccgagatcaatgccagaaaagccaaaaactctgttactagcctcctcagcattattaatgacctcttggagcagctggggcagctggatacagtggacctgaataagctaaacgagattgaaggcaccctaaacaaagccaaagatgaaatgaaggtcagcgatcttgataggaaagtgtctgacctggagaatgaagccaagaagcaggaggctgccatcatggactataaccgagatatcgaggagatcatgaaggacattcgcaatctggaggacatcaggaagaccttaccatctggctgcttcaacaccccgtccattgaaaagccctagtgtctttagggctggaaggcagcatccctctgacaggggggcagttgtgaggccacagagtgccttgacacaaagattacatttttcagacccccactcctctgctgctgtccatcactgtccttttgaaccaggaaaagtcacagagtttaaagagaagcaaattaaacatcctgaatcgggaacaaagggttttatctaataaagtgtctcttcc

SEQ ID NO: 28798 - DNA, 1431 bp, Homo Sapiens
ggcgggtctgcttctaaaagaagaagtagagaagataaatcctgtcttcaatacctggaaggaaaaacaaaataacctcaactccgttttgaaaaaaacattccaagaactttcatcagagattttacttagatgatttacacaatgaagaaagtacatgcactttgggcttctgtatgcctgctgcttaatcttgcccctgcccctcttaatgctgattctgaggaagatgaagaacacacaattatcacagatacggagttgccaccactgaaacttatgcattcattttgtgcattcaaggcggatgatggcccatgtaaagcaatcatgaaaagatttttcttcaatattttcactcgacagtgcgaagaatttatatatgggggatgtgaaggaaatcagaatcgatttgaaagtctggaagagtgcaaaaaaatgtgtacaagagataatgcaaacaggattataaagacaacattgcaacaagaaaagccagatttctgctttttggaagaagatcctggaatatgtcgaggttatattaccaggtatttttataacaatcagacaaaacagtgtgaacgtttcaagtatggtggatgcctgggcaatatgaacaattttgagacactggaagaatgcaagaacatttgtgaagatggtccgaatggtttccaggtggataattatggaacccagctcaatgctgtgaataactccctgactccgcaatcaaccaaggttcccagcctttttgaatttcacggtccctcatggtgtctcactccagcagacagaggattgtgtcgtgccaatgagaacagattctactacaattcagtcattgggaaatgccgcccatttaagtacagtggatgtgggggaaatgaaaacaattttacttccaaacaagaatgtctgagggcatgtaaaaaaggtttcatccaaagaatatcaaaaggaggcctaattaaaaccaaaagaaaaagaaagaagcagagagtgaaaatagcatatgaagaaatttttgttaaaaatatgtgaatttgttatagcaatgtaacattaattctactaaatattttatatgaaatgtttcactatgattttctatttttcttctaaaatcgttttaattaatatgttcattaaattttctatgcttattgtacttgttatcaacacgtttgtatcagagttgcttttctaatcttgttaaattgcttattctaggtctgtaatttattaactggctactgggaaattacttattttctggatctatctgtattttcatttaactacaaattatcatactaccggctacatcaaatcagtcctttgattccatttggtgaccatctgtttgagaatatgatcatgtaaatgattatctcctttatagcctgtaaccagattaagcccccc

SEQ ID NO: 28799 - DNA, 2950 bp, Homo Sapiens
gtcacaccctcgaataatgacgcatacctatcctactgttactgatcacctagtaataatcttgtagttcacattactcatttttcaccaaattcttttggtgaaggacgcttcagaaacggccatcactgaagagcagacccgtttgggttctccacgcattctagactcccgaagagctcatgttttttggctagacctatgaccattttcgctagacttcactgcacgttttctcaagtatcttctttgtccctaatgtgtgacacctcatcatggacacgctactttagctaaggcatgaccagcaatgaacagtagtaagatatgtgctgattagaaggctcacttgtgcagtgtggaggataaccagtgccttacaaaatggggtttgggagtgacctgaagaattcacatgaagcagtgttaaaattgcaagactgggaattacggttactggaaacagtaaagaaatttatggccctgagaataaaaagtgataaagaatatgcatctactttacagaacctttgtaatcaagttgataaggaaagtactgtccaaatgaattatgtcagcaacgtatccaagtcttggctacttatgattcagcagacagaacaacttagtaggataatgaagacacatgcagaggacttgaactctggacctttacacaggctcaccatgatgattaaggacaagcagcaggtgaagaaaagttacataggtgttcatcagcagatagaggcagagatgatcaaggttaccaaaacagaattggagaagttaaaatgcagctatagacaattaataaaagaaatgaattctgccaaagagaaatataaagaagctttagctaaagggaaggaaactgaaaaggccaaggaacgatacgacaaagccacaatgaaacttcatatgttgcacaatcagtatgtattggcgttgaaaggggcacagctccatcagaatcagtattatgatatcacacttcccctgcttctggactccttacaaaagatgcaagaagaaatgataaaagcactcaaaggtatatttgatgaatacagccagataaccagtcttgtcacagaggaaatagtgaatgtccataaagagattcaaatgtcggttgaacagatagatcctagtacagaatacaataatttcatagatgttcacagaacaacggctgctaaagaacaagaaatagagtttgatacttccttactggaagaaaatgaaaatcttcaggcaaatgagatcatgtggaataacttaacagcagaaagtttgcaagtaatgttgaaaacgttagcggaagaacttatgcaaacacagcagatgcttttaaacaaggaggaggctgttttggagttagagaagagaattgaagaatcttctgaaacttgtgagaagaagtctgatattgtgcttctgctaagccaaaaacaggcacttgaagaactgaaacagtcagtccagcagctgagatgcactgaagcaaagttttcagcacagaaggaattactagagcaaaaagtgcaagaaaatgatgggaaagagccacctccagtagtaaattatgaagaagatgcacgatcagttacatctatggaaagaaaggagaggctatccaaatttgaatctattcgtcattcaattgctggaataattaggtctccaaaatctgcagtgggctcttcagcactttctgatatgatctccatcagtgagaagcctttggcagaacaggactggtaccatggtgcaattcccagaatagaagctcaagaactgttaaaaaaacaaggagactttttggtgcgagagagtcatgggaaacctggtgaatatgtcctttctgtatattctgatggacagaggagacattttatcatacaatatgttgataacatgtatcgattcgagggcactgggttttcaaacattcctcaacttatagatcatcactatacaacaaaacaggtcatcactaagaaatcaggtgtagttctgctgaatcctattcctaaggacaagaaatggattctcagtcatgaagatgtcatattgggagaattactgggcaagggaaattttggtgaagtatataagggcacattaaaggataaaacttctgttgctgttaaaacatgtaaagaagatcttcctcaggaattgaaaataaaatttttacaagaagccaaaattctcaagcaatatgatcatcccaatattgtcaaacttataggagtttgcacacaaagacagcctgtctacatcattatggaactggtttcaggaggtgatttcctcacctttctgagaaggaagaaggatgaactaaaactcaaacagttagtgaaattttcattagacgctgctgctggtatgttgtatctcgagagtaaaaactgtatacacagggaccttgctgcaagaaactgcctggtaggtgaaaataatgttctgaaaatcagtgactttggaatgtctcgtcaagaggatggtggagtgtattcatcttctggcttaaagcagattcccattaaatggacagcaccggaagctcttaattatgggagatacagttcagagagtgacgtgtggagctttggcatccttctctgggagaccttcagcttaggggtttgtccgtaccctggaatgacaaatcagcaagcaagagagcaagtagaaagaggataccggatgtcagctccccagcactgtccagaggatatttccaaaatcatgatgaagtgttgggattataaacctgaaaatcgccctaagttcagtgaacttcagaaagagctcactatcatcaagagaaaactcacatagtgacaggatggcgccaaactcagccttcaggactctgtcctccagcagagtaacattattgttctcattaacaatgaatttataccacattaccttc

SEQ ID NO: 28800 - DNA, 17509 bp, Homo Sapiens
gggacatctagctatgtctagacccattgaactttcaagtcttcgaggcttggtactgcctgatccctgttcccctctgatccttaaggtcagagagcaaagccttggggggtactttttttttttttttttgagacagattcttgctctgtcacccaggctggagtgcaatagcatgatctcggctcactgcaacctccacctcccaggttcaagcgattctcctgcctcagcctcccaagcagctaggattacaggcacgcaccaccatgcctagctgatttttatatttttagtagagatggggtttcatcatattggccgggctggtcttgaactcctggcctcaagtgatccacctgccttggcctcccgaagtgctaggattacaggtgtgagccaccatgccctgtcttggggtacttttgaggacaagagttaagttcgggactgggcatgttggcttatacactttgggaggcaaaggtgagaggattgttccagcccaggaatttgagaccagcctggtcaacatagcaagactctgtctctataagaaaaataataattagctgggcgtggtggtgcttgcctgtagtccccgatacttgcttgagcccaggagttcaagtctgcagtgtgctatgatcacatgactgcactccagccttggtgacagagtgagaccctgtctccaaaaaaaaaaaaaaaaagagatgggtttggggctggacttgtcttcttccaagaggtcagggcagttgcttcttcctcaccgctaaccacactctcagggactccaaaccacaactaagaaaaggaaaaagacataaacaagaggcagtttcacaggaagagttctcctaatgtgtctgtgagcctaactttccgactgtggttctcctctctttccctgccagctgtgagaaagcaaagcctaaggcagattaaaaagcaggagggctgctcagtgtggttgcccttggtatctgtttactgaaaaaattcaaaacaaacatccgacgcttccacccactgaaacttcctgtgactctgctatcggctgttgccatggattctcccaactgaaccccaccacatacactaaacccaacagtccgtggaccccaagtatgccatctctccaatacaggaccccctgggcagcaccctggccacccttccatccacaacatccagaccacacggccaagggcacctgaccctgtcaaaaccccaaatccagctgggcgcggtggctcatgcctgtaatcccagcatttgggaggccgaggcagccggattcacgaagtcaggagttcgagaccagcctgaccaaacatggtgaaccccgtctctactaaaatacaaaaattagccgggcgtggtggtgcacacctgtaatcccagctactcgggaggctgaggcaggagaaccacttgaacctgggaggcggagattgcagtgagccaagatagtgctactgcactcagcctgggcaacaaaataagactccgtctcaaaacagaaaaacaaaaaaaacaaaaaacaacaacaacaacaaaatccactagtctagccctacatgctcacccactgctagccagtttccaccctctacagcagaggtacccaacctctgggccaggggcccgtactggtccatagcctgttaggaacccaggctgcataaccaggaggtgagtggcaggtgagtgaaatttcatctgtagttacagccactcctcatcactcgcattaccaccagagctccactccctgtcagatcagcggcggcattagattctcataggagctcgaaccctattctaaactgttcatgtgagggatctaggttgcaagctccctatgagaatctaatgcctgatgatctgtcacggtctcccatcacccctagatgggaccatctagttgcaggaaaacaagctcaggctcccactgattctacacgatggtgaattgtggaattatttcattatatatattacaatgtaataataatagaaataaagcacacaataaatgtaatgtgcttgaatcatcccgaaaccatcccaccctggtctgtgaaaaaattgtcttccatgaaaccagtccctggtgccaaaaacgttgaggaccactgctccacagaatctatcggtcactcttcctcccctcacccccttgccctaaaagcacaccctgcaaacctgccatgaattgacactctgtttctatcccttttccccttgtgtctgtgtctggaggaagaggataaaggacaagctgccccaagtcctagcgggcagctcgaggaagtgaaacttacacgttggtctcctgtttccttaccaagcttttaccatggtaacccctggtcccgttcagccaccaccaccccacccagcacacctccaacctcagccagacaaggttgttgacacaagagagccctcaggggcacagagagagtctggacacgtgggggagtcagccgtgtatcatcggaggcggccgggcacatggcagggatgagggaaagaccaagagtcctctgttgggcccaagtcctagacagacaaaacctagacaatcacgtggctggctgcatgccctgtggctgttgggctgggcccaggaggagggaggggcgctctttcctggaggtggtccagagcaccgggtggacagccctgggggaaaacttccacgttttgatggaggttatctttgataactccacagtgacctggttcgccaaaggaaaagcaggcaacgtgagctgttttttttttctccaagctgaacactaggggtcctaggcttttgggtcacccggcatggcagacagtcaacctggcaggacatccgggagagacagacacaggcagagggcagaaaggtcaagggaggttctcaggccaaggctattggggtttgctcaattgttcctgaatgctcttacacacgtacacacacagagcagcacacacacacacacacacatgcctcagcaagtcccagagagggaggtgtcgagggggacccgctggctgttcagacggactcccagagccagtgagtgggtggggctggaacatgagttcatctatttcctgcccacatctggtataaaaggaggcagtggcccacagaggagcacagctgtgtttggctgcagggccaagagcgctgtcaagaagacccacacgcccccctccagcagctgaattcctgcagctcagcagccgccgccagagcaggacgaaccgccaatcgcaaggcacctctgagaacttcaggtaggagaaaagcaaactccctccaacctcttacttcgggcttaaggcagagaactcgcctccccagaatctcctccctccatgatcccccgctattcctctattttcttttcctcggacctgcagccttgggtcgaccctgccctaggggtgactgcaggagagcagggaggatggtcaggcgtcaccaacaaccccatcacccagtaacaagaaccttgactctctcagtccctctgcatcaagacacttacccatttcccacctcatgcctgctaacttgaatgaaacaatcgctgggaaagcattaagagattaaggctgggcactgtggctcatgcctgtaatcccagcactttgtgaggctgaggcaggcagataacttgagcccaggagtttgagaccagcctgggcaacatggcaaaaccctgctctcccaaaaaaatacaaaaattagctgggcgtgctggtgtgcctgtattcccagctacttgggaggctgaggtgggaggattgcttcagctggggaggacggaggctgcagggagccaagactgagccattgcacccagcctgggtgacagagcaagaccctgtctctaaaaatgaatgaaaggaaggaagaaagagagagaaagagagagaggaaagaaggaaggaagtaaagaagaaagaaagaaagaaagaggaaagaggaagaaagaaagaaaagaaagaaaagaaaagaaagcaaatttaaagcttatgcaaatcaaagatgttgtgataattgataattgagtctgggctaaattccccctgggctgcaaaggcagagagtggtaatgactctcacctgcttttcttctaaggcttttttacgggacacagagggaagggagatggactggattccaagattcccacagggcaagatgggcgaagactccctgccactgcccggggataagtcagtctgagtgagacggagtgggatgggcttagaacctgaacatgtcatggtctcttcctgcaccttgccctagtgttcacttaccacctgcttgcaggaaacaagaagagcagggcccacagctggccagctcccctcccctcccgcctgtcttccagaacgattccttcaccagccctctttccattgctctaggatgcagatgtctccagccctcacctgcctagtcctgggcctggcccttgtctttggtgaagggtctgctgtgcaccatcccccatcctacgtggcccacctggcctcagacttcggggtgagggtgtttcagcaggtggcgcaggcctccaaggaccgcaacgtggttttctcaccctatggggtggcctcggtgttggccatgctccagctgacaacaggaggagaaacccagcagcagattcaagcagctatgggattcaagattgatggtgagccacgggacaccaggggaggtgggtggcatgcagaacagacctaccagaagccaaggaaaggctggctctggcttagccgagccaagccccatacagctgtgctgcaggggccaccccatcttcttcccactacactccaagtcactggacccttgaatctccaagggtgtctgaccagtagatttaccgcttattcaccaccgtgtgatcttaacctcgttaagtttgcccatctacaaaatgaggattatttgctgtcctaaagaattcatgagccgggcgcggtggctcaaacgcctgtaatcccagcactttgggaggccaaggcgggcggatcatgaggtcaggagatcaagaccatcctggctaacacagtgaaactccatctctactaaaaatacaaaaaaaattagccaggcgtggtggcaggcgcctgtagtcccagctactcgggaggctgaggcaggagaatggcatgaacccaagaggcagagcttgcagtgagctgagatcgtgccactgcactccagcctgggcgacagagagagactccgtctcaaaaaaaaaaaataaagaattcatggaattacacttgtgaaatacttagcatagccatcactataggaaaaaaatctaaggccaggcacagtgcctcatgcctgtaatctcagcacttttggagtttgaggcaggaggatcacccaaggctaggagttcaaggccagcctgggcaatacggtgaaaccccgtctctaataaaaatataaaaattagtctgatgaggtggtgcacctgtaatcccagctactcaggaagctgagacacaagaatcactttaacccgggaggtggaggtggcagtgagctgagatcacaccattgcactccagcctaggtgacagagtgagacctgtcaaaaaaaaaaaaagaaagagagagagagagagaagagagagaaagaaagaagaagaaagaaagaaagagagagagagaaagaaagaaagaaagaaagaaagaaacaaagaaacaaagaaagaaaggaaaagaaaaaaaaaactaaggccaggcaaggtggcttatgactgtaatttcagcactttggaagattgaggcaggaggatcacttgaggccagaagttcgagacaagactgagcaacagggagacccctgcctctacaaaaaaatttacaaattagccagatgtggtgacacatacctgtagtcccaactactcaggaggctgaggtgggaggatggcttgagcccaggagctggaggctgcagtgagctatgattgtaccactgcacttcagcctgggcaacaaagggaagccctgtctgaaaaaaaaaaaaaaagaaaaagaagaagaaagaaaatatttgggttcaaccaggaggcgaggttgcagtaagctgacatcgcgccattgcactccagcctgggagacaagagcaaaactccaactcaaaaaaaaaaaaaaaaaaaaacaggaagaaaatatttagggttcataacttaagaacagagaaaaatattctagcccaaagaaagggttgggatctgagacttttgaagaaaggaaggagatacagaaaagagatttcatcctggaatgaaatctccctccagagagccctgggaaagcacggtagcccccatccatcagagtggagccccttgtgggggaagtgggctcggctgggaaccctcaattcagcataagcctcacatgtcctctcctctctgtcccggtgcagacaagggcatggcccccgccctccggcatctgtacaaggagctcatggggccatggaacaaggatgagatcagcaccacagacgcgatcttcgtccagcgggatctgaagctggtccagggcttcatgccccacttcttcaggctgttccggagcacggtcaagcaagtggacttttcagaggtggagagagccagattcatcatcaatgactgggtgaagacacacacaaaaggtgagcaggcagggaaaggaaacccatttcctgggcctcaagagaaagggaatttggaaataaatccacatatcccagttgggtgcagtagttcacacctgtaatcccagcccaacactttgggaggtctaggcgagaggaaggcttgaggcctggagtttgagaccagcctggccaacataacaagacctcatctcttcaaaaaatttaaaaaccagccgggcatggtggtgcacacctgtagtcccagctacttgggaggctgaggtgggaggatcacttgagtccagcagttcaaggctgcagtgagctatgtttgcaccaccacactccagcctgagtcacagaacaagacctcatctctaaaaaacaaacaaaaaccaaatccacatatcctaaaaaatgctccttttcagcattctcttctctatggacaaagggctggatgctttaagaaccaaatcttaggctgggcacggtggctcacgcctctaatcctagcactttgagaggccaaggcgggcagattgcctgagcacaggagttcgagaccagcctggccaacatggtgaaaccctgtttctgtcaaaaatacaaaaaattagccaggtgtgttggcgcgtgcctataatcccagctgctcgggaggatgaggttcaaagaatcacttgaacccgggaggcagaggctgcagtgagctgagatcatgccactgcactccagcctgggtgacagagcaagactttgtctccaaaaaaaggaactagacgggttcatttaaacccctgactgcagccctttgacatacatccaattgaggactggggactccgggaaacatctaaaaggcttaaaaactttgtctaacttcagccgggcatggtggctcacacctgtaatcccagcactttgggaggctgaggcaggtggatcacaaggtcaggagtttgagacgagcctgaccaacatggtgaaaccccgtctctactaaaaatacaaaaattagccaggcatggtggcaggcgcctgtaatcccagctattcgggaggctgaggcaggagaattgcttgaaccccggagacagaggttgcagcgagccgagatcgcgccactgcactccagcctggcaatagagtgagactccatctcaaaacaacaacaacaacaacaacaacaaaatcgtctaacttcctgatcttcctgatcattgattttcccataggtatgatcagcaacttgcttgggaaaggagccgtggaccagctgacacggctggtgctggtgaatgccctctacttcaacggccagtggaagactcccttccccgactccagcacccaccgccgcctcttccacaaatcagacggcagcactgtctctgtgcccatgatggctcagaccaacaagttcaactatagtaagtccaagagccccttccccacagcccacagcaactgcatctcattcctggggtctcccaaggaatacccaaaatgtcaccctctgagggaggaagaccacagggaatgctcccctttaagggaggagagaccctagaatatactccagctttgacaaagatttcccaagcaggagacatcaggataatgggaacagaagacaggaggtttatcccatgaaggatgaagaagctgaaatccagagattccctcagggccacatttgtccacctgactccagggtctcatcttcgtgtgttgctagtgtgattacctggggatgagaaatcctgctgggggagttgaggttaagaggatgaggactccaggtgctgtggctcacgcctgtaatcccagcactttgggaggccaaggcaggtggatcaggagtttgaggtcaggagtttgagaccagcctggccaacatggtgaaaccctgtctctactaaaaatgcaaaaattagccaggtgtggtggcaggcgcctgtaatcccagctactcgggaggctgaggcaggagaatcacttgagcccgggaggtggaggttgcagtgagccgaacgaaattgagccacttcaccccagcctgggcgaaagagtgaaattccattcaaaaaaaaaaggatgaggactgggatgaactggtggctgggtgtggggaaaatggaagtgaaggaaggccaaaagagacagagaaggcctggcgcggcgactcacgcctataatcccagcactttgggaggctgagaagggggattgcttgaggccagaagttgaataccagtctgggcagcatagcaagaccctgcctctacaaaaaaaaaattttttttaattagccaggcttggtgacatgcatctgtagtctactcaagaagctgaggtgaggccaggcatggtggctcacgcctgtattcccagcactttgggaggtcaaggcgggtggatgacctgaggtcaggagttcaagaccagcctggccaacatggtgaaaccccatctgtataaaaatacaaaaattagctgggcatgatagcaggtgcctgtaattccagctactcaggtggctgaggtgggagaatctattgaacccgggagggggaggttgcagtgagccgagatcatgccattgcactccagcctgggcgacagagtgagactccttctcaaaacaaacaaacaaacaaacaaaatacagaagctgaggcgggaggaacatttgaaccggattcggaggctgcagtgagctatgattgcaccactgcgctccagtctgtgtgacagtgagaccctgtctcttacacacacacacacacacacacacacgcacacacacagagagaaattagaagatactgaattggcagaagagaagggaaatagaaattaaaatactgaataggggagcagtgaacaggggatacccaaaagccaagagcgagagagagcctggcttccagaaatagtggagaagccaggagaactaggtgaaaacccagtgctgggttgccatcagcaagagctggagccatttccaacgaaccatcttgtcgtcttcacagctgagttcaccacgcccgatggccattactacgacatcctggaactgccctaccacggggacaccctcagcatgttcattgctgccccttatgaaaaagaggtgcctctctctgccctcaccaacattctgagtgcccagctcatcagccactggaaaggcaacatgaccaggctgccccgcctcctggttctgcccaagtaagccaccccgctatctccccgacctaccaacccctctctcctggctccctaaagtcaccgcccccaggttgaatttcccagatctgtgacgcttgcaggacatgcatgtgtgggaggctgatgggaaactgtggcctgggtttgattatgagtcttgcaatcatccctccccctgtttctgctggagggcaggggacagctcttcctgaccacacccccacattgactatccccagaatacccagcaaaagcccccaaaaggagagtcagagaaatgagggaggtgggggcccaatcagtccacatctacttagggtcgccccatcagcacttccatccccaaccctttcaagtcaacatccaaacaaaagaaatcacttccaaggacggagcagctcaaagcgcagctctagctggggttccaagaaagcagatttttcgaaatccttctgcagaaggaagcaaagagattttttgaaatctttctgcagaaggagaaggctggagctggggaactccagaattatagggaagcctcccaccacgctcatcccaaatttccggatgctataatgccaggcttggggaaagaggagaatttagttggttagctggtgcgtgctctcacttgcatcctctctcttcctcttttttttttttctcctctctctctggctcataaaaatggaggtaattagttgtgccctggtgagaagcagagagtgcacaaaggccccctgcttgagtcctcttcagggttagctctcagaaacacaatctgcagaacagatttttgttccaacatccttgcaggagaatttgcccttagcttcccccaccccagccaggctgaataaaattatgctgaaactactgtcttatttgaggaaagtaattagtcataggtgggagggggtggggagattgcagaagaatgttcatgaatattaggattttcagctctaaggggggactttgtaaacagctttagaagaagaaccaggccggctgggtgtggtggctcatgcctgtaatctcagcatttggggaggccaaggcgggcggatcacttgaggtcaggagtttgagaccagcctggccaacatggtgaaaccctgtctctattaaaaatacaaaaattagccggctgtggtagcgagcgcctatgatcccagctactccggaggctgaggccagagaatcacatgaacctgggaggtggaggctgcagtgagccgagatcacgccactgcactccagcctgggggacagagcaagaatctgtttcaaaaaaaaaaaaagaaaaataggaaggaaggaaggaaaggaaaggaaagaagagagagagaaagaaagagagagaaagaaagaaagaaagaaagaaagaaagaaagaaagaaagaaagaaagaaagaaagaaaaagaaaggaaagaaagaacgaacgaaccaggcctccctctccaaccttcacctccgtccctattctggccacttgattcgggggacacctggtaggggatggggaaaggtgggagctgccagccagagggggaccccggcttgagcagcctcttgctgctatctgcaggttctccctggagactgaagtcgacctcaggaagcccctagagaacctgggaatgaccgacatgttcagacagtttcaggctgacttcacgagtctttcaggtaagaagactttcctttgcattttctcaccccagtggactgcgggggcccctaagaggaaaaaggaacctctccttgagagcggcagcgatctaatcctgtatccacatctgtttcagaccaagagcctctccacgtcgcgcaggcgctgcagaaagtgaagatcgaggtgaacgagagtggcacggtggcctcctcatccacaggtgagtctggctcaggtgaggctccacgggtgtcgcctccatcgcccttcaggataactggtccccagacccggaaaggaccccgcagccctctcggcacagagcagctctgtctgtgctcagccatcacccactccccacctgtttctcagcctggaaaacgggcttgggaccatggaaccctgtttcctcgcctgatggctcctaagttccctgactgtgaaaaggcctcctaaagaaaaacccaagttgttcccacagtgggaagtaaacttaagaaacatgcttatcaggctgggcatggtggctcccacctgtaatcccagcgctttgggggaccaaggcaggtgaatcacttgaggtcaggaattcgagaccagcctgggcaacatggcaaaaccctatctctactaaaaatacaaaaattaggcaggcgtggtggcatgtgcctgtagtcccagctacttgggaggctgaggcaggagaatcacttgaatccaggaggcagaggttgcagtgagccgagatcacgctgctgcactccagcctgggcaatagagcatgactctgaagaaaagaaagaaagaaagagagagagagagaaaagaaagaaagaaagaaagaaagaaagaaagaaagaaagaaagaaagaaagaaagaaagacaaagaaagagaaagaaagagaagaaaagaaaagaaagagcttatcaataagcccttaaaggatttagataaatgtgtgtaagggaagagctgatccattgctaccaagctcctggaggaaaccaggtctcagaggatgtccctaaacttttaaggttcatattcaggaaaacaaacaacttccagctgggcttagtggctcactcctgtaatcccagcactttgggaggccgaggcaggaggatcgcttgagcccaggaatttgagaccagcctgggcaatataatgagactgtgtctctacaaaaattagaaaaaaattagccaggcatggtggcatgcacctgtagccccagttacttgggagactgaggtgggaggatcacttgagcccatgagttcaaggctgcagtgagccatgaaggtgccactgcactcccgcctggcgacagagggagaccctgtctctaagaaaaacggcgggggtgggggtggtgccagtgccagcatccctctgttctaagacattgtcccttctcttgcagctgtcatagtctcagcccgcatggcccccgaggagatcatcatggacagacccttcctctttgtggtccggcacaaccccacaggtgagcctggaacccatcacgttccacatcctcccacccattctttctctcaggaactagtcccgacagatgcagacatccctctatccctgagagggctctgggcagggaacccataaccctaccctgcttcctgtcccaagaggaggctaccttctatcacccacagacagtgccgggtccccgctctgtgactcaggcagctgcgactccagacagctcactcatctgcctagatctcagtccttccacccacatccagcctgatgagctgtcccactccttctgcttctcaacccccatggttcttccaccctcaggaacagtccttttcatgggccaagtgatggaaccctgaccctggggaaagacgccttcatctgggacaaaactggagatgcatcgggaaagaagaaactccgaagaaaagaattttagtgttaatgactctttctgaaggaagagaagacatttgccttttgttaaaagatggtaaaccagatctgtctccaagaccttggcctctccttggaggacctttaggtcaaactccctagtctccacctgagaccctgggagagaagtttgaagcacaactcccttaaggtctccaaaccagacggtgacgcctgcgggaccatctggggcacctgcttccacccgtctctctgcccactcgggtctgcagacctggttcccactgaggccctttgcaggacggaactacggggcttacaggagcttttgtgtgcctggtagaaactatttctgttccagtcacattgccatcactcttgtactgcctgccaccgcggaggaggctggtgacaggccaaaggccagtggaagaaacaccctttcatctcagagtccactgtggcactggccacccctccccagtacaggggtgctgcaggtggcagagtgaatgtcccccatcatgtggcccaactctcctggcctggccatctccctccccagaaacagtgtgcatgggttattttggagtgtaggtgacttgtttactcattgaagcagatttctgcttccttttatttttataggaatagaggaagaaaggtcagatgcgtgcccagctcttcaccccccaatctcttggtggggaggggtgtacctaaatatttatcatatccttgcccttgagtgcttgttagagagaaagagaaccaccaaggaaaataatattatttaaactcgctcctagtgtttctttgtggtctgtgtcaccgtatctcaggaagtccagccacttgactggcacacacccctccggacatccagcgtgacggagcccacactgccaccttgtggccgcctgagaccctcgcgccccccgcgccccccgcgcccctctttttccccttgatggaaattgaccatacaatttcatcctccttcaggggatcaaaaggacggagtggggggacagagactcagatgaggacagagtggtttccaatgtgttcaatagatttaggagcagaaatgcaaggggctgcatgacctaccaggacagaactttccccaattacagggtgactcacagccgcattggtgactcacttcaatgtgtcatttccggctgctgtgtgtgagcagtggacacgtgaggggggggtgggtgagagagacaggcagctcggattcaactaccttagataatatttctgaaaacctaccagccagagggtagggcacaaagatggatgtaatgcactttgggaggccaaggcgggaggattgcttgagcccaggagttcaagaccagcctgggcaacataccaagacccccgtctctttaaaaatatatatattttaaatatacttaaatatatatttctaatatctttaaatatatatatatattttaaagaccaatttatgggagaattgcacacagatgtgaaatgaatgtaatctaatagaagcctaatcagcccaccatgttctccactgaaaaatcctctttctttggggtttttctttctttcttttttgattttgcactggacggtgacgtcagccatgtacaggatccacaggggtggtgtcaaatgctattgaaattgtgttgaattgtatgctttttcacttttgataaataaacatgtaaaaatgtttcaaaaaaataataaaataaataaatacgaagaatatgtcaggacagtcactgccttcaccttctccatttcacaccggtggtacaagaaatcagaagcctaggccaggtgtggtggttcatgcctgtaatcccagcactttgggaagccgaggtgggtggatcacctaaggtcaggagtttgagaccagcctggacaacatggtgaaaccccgtctctactaaaaatacaaaaattagccgggcgcggtggctggcgcctgtaatcccagctactcgggaggctgaggcaggagaatcacttgaagccaggaggcagaggttgcagtgagctgagattgcaccactgaactccaggctgggtggcagagcgagactccctctcaaaaaacaacaactacaaagacaacaacaaacccagaatcaaaatcctgttggtccatagacctcatgggtggaagagaccttcctacatccaggttggcccaacatgggggagtccatgaaatggtcacctcagctctgccacaagccccaaggataagttgattctgcccctgggaatcatcctcaaaaaggaaaaaaatgttcccctgccataaactttccacttatgcagatgggcctgctcgtaagtcactgtcactgtgggttcccaactctgttcatgacacttccttccagcaccaaatgcttcccacccctctactcccactccccattcttcaaacccagctcaagttccagttcctccacctaggacttcccatggatccggccaatatcactctcaggtccagcgcagtggcccacgcctgtaatctcagcactttgggaggccggggcaggaagattgcttgaggccaggagtttcagaccagcctggacaacatagtgagactcttcctctaagaaaagaaagagagaaagagagagagaaagacagaggaaagagagagaaaaataaagaaagagaaagagagaaagaaagaaagaaaaagaaaaagaacgaaagaaagaaagaaagagaaagaaagaaagaaagaaaaagaaaggaaggaaggaaggaaagaaaggagggagggagggagggaaggaaggaaggaaggaaggaaggggatcaaaacatcatcactctcaactcgacactgactgagttttcttctccctggtctgtaacagtgcttggattctcgagtgttctttagctttgtgtgtgtgtgtcttaccctccccaagcccatcaaggtatcaggtttcttgaaaacaaggctctcttgttatatatactctagcatcttcttgaaaatggcttcctgaaaagtcttttattatctttctccagcatctcgaaggcttttggcagagggcacacttccctccattagtttctgttcaaatattcaaaaataattttttaaactgaaaaaagaccaataaccatctgttgaacttgtatactgtctaactccagaaccctgaagataggattcagagatgcagccccctgaacacccgactcatttctattgctttttaaacaattttttgtagaacggggttgcaccatgttttgaacttttgggctcaaacaatcctcctgcctcggcctcccaaattgctgggattacagttgtgagccaccatgcccagcttggctcaggtgtacctttcaacctccttataccctgaaagtatgactaattcaggcccaggctagtggctgaaaagttacctgtctctaacagatttgcttggaaagctaaacagcctctttttgcacaaaatgcttcaaaaagcagaacaaattagccctaactctgcagtatacagttcaaaaactgctcatccatgctgagatggctctagaggaaaaagagtccttcaaaaagcccccttaccacagaggaggcttgttccaggaaatccccaatttacaagctctcaagctattgtgaggcaaaaaatgatgtagactcagcaagcacgagacctgcccagccctgtttagctttgcctagccctgtcccttgcctgttctaagtttgtcttcccttctctatttttttttttcttttaagacagggtctcgctttgttgctgaggcaaaagtgcagtagcacaatcttagcttattacagcctccatctcctaggcccaaagccatcctcgcacctcagcctcccgagtagctgggaccacaggtgtgcgccgccaagccctgctaatattt

SEQ ID NO: 28801 - DNA, 4740 bp, Homo Sapiens
gaattccgtggttcctcagtggtgcctgcaacccctggttcacctccttccaggttctggctccttccagccatggctctcagagtccttctgttaacagccttgaccttatgtcatgggttcaacttggacactgaaaacgcaatgaccttccaagagaacgcaaggggcttcgggcagagcgtggtccagcttcagggatccagggtggtggttggagccccccaggagatagtggctgccaaccaaaggggcagcctctaccagtgcgactacagcacaggctcatgcgagcccatccgcctgcaggtccccgtggaggccgtgaacatgtccctgggcctgtccctggcagccaccaccagcccccctcagctgctggcctgtggtcccaccgtgcaccagacttgcagtgagaacacgtatgtgaaagggctctgcttcctgtttggatccaacctacggcagcagccccagaagttcccagaggccctccgagggtgtcctcaagaggatagtgacattgccttcttgattgatggctctggtagcatcatcccacatgactttcggcggatgaaggagtttgtctcaactgtgatggagcaattaaaaaagtccaaaaccttgttctctttgatgcagtactctgaagaattccggattcactttaccttcaaagagttccagaacaaccctaacccaagatcactggtgaagccaataacgcagctgcttgggcggacacacacggccacgggcatccgcaaagtggtacgagagctgtttaacatcaccaacggagcccgaaagaatgcctttaagatcctagttgtcatcacggatggagaaaagtttggcgatcccttgggatatgaggatgtcatccctgaggcagacagagagggagtcattcgctacgtcattggggtgggagatgccttccgcagtgagaaatcccgccaagagcttaataccatcgcatccaagccgcctcgtgatcacgtgttccaggtgaataactttgaggctctgaagaccattcagaaccagcttcgggagaagatctttgcgatcgagggtactcagacaggaagtagcagctcctttgagcatgagatgtctcaggaaggcttcagcgctgccatcacctctaatggccccttgctgagcactgtggggagctatgactgggctggtggagtctttctatatacatcaaaggagaaaagcaccttcatcaacatgaccagagtggattcagacatgaatgatgcttacttgggttatgctgccgccatcatcttacggaaccgggtgcaaagcctggttctgggggcacctcgatatcagcacatcggcctggtagcgatgttcaggcagaacactggcatgtgggagtccaacgctaatgtcaagggcacccagatcggcgcctacttcggggcctccctctgctccgtggacgtggacagcaacggcagcaccgacctggtcctcatcggggccccccattactacgagcagacccgagggggccaggtgtccgtgtgccccttgcccagggggcagagggctcggtggcagtgtgatgctgttctctacggggagcagggccaaccctggggccgctttggggcagccctaacagtgctgggggacgtaaatggggacaagctgacggacgtggccattggggccccaggagaggaggacaaccggggtgctgtttacctgtttcacggaacctcaggatctggcatcagcccctcccatagccagcggatagcaggctccaagctctctcccaggctccagtattttggtcagtcactgagtgggggccaggacctcacaatggatggactggtagacctgactgtaggagcccaggggcacgtgctgctgctcaggtcccagccagtactgagagtcaaggcaatcatggagttcaatcccagggaagtggcaaggaatgtatttgagtgtaatgatcaggtggtgaaaggcaaggaagccggagaggtcagagtctgcctccatgtccagaagagcacacgggatcggctaagagaaggacagatccagagtgttgtgacttatgacctggctctggactccggccgcccacattcccgcgccgtcttcaatgagacaaagaacagcacacgcagacagacacaggtcttggggctgacccagacttgtgagaccctgaaactacagttgccgaattgcatcgaggacccagtgagccccattgtgctgcgcctgaacttctctctggtgggaacgccattgtctgctttcgggaacctccggccagtgctggcggaggatgctcagagactcttcacagccttgtttccctttgagaagaattgtggcaatgacaacatctgccaggatgacctcagcatcaccttcagtttcatgagcctggactgcctcgtggtgggtgggccccgggagttcaacgtgacagtgactgtgagaaatgatggtgaggactcctacaggacacaggtcaccttcttcttcccgcttgacctgtcctaccggaaggtgtccacactccagaaccagcgctcacagcgatcctggcgcctggcctgtgagtctgcctcctccaccgaagtgtctggggccttgaagagcaccagctgcagcataaaccaccccatcttcccggaaaactcagaggtcacctttaatatcacgtttgatgtagactctaaggcttcccttggaaacaaactgctcctcaaggccaatgtgaccagtgagaacaacatgcccagaaccaacaaaaccgaattccaactggagctgccggtgaaatatgctgtctacatggtggtcaccagccatggggtctccactaaatatctcaacttcacggcctcagagaataccagtcgggtcatgcagcatcaatatcaggtcagcaacctggggcagaggagcctccccatcagcctggtgttcttggtgcccgtccggctgaaccagactgtcatatgggaccgcccccaggtcaccttctccgagaacctctcgagtacgtgccacaccaaggagcgcttgccctctcactccgactttctggctgagcttcggaaggcccccgtggtgaactgctccatcgctgtctgccagagaatccagtgtgacatcccgttctttggcatccaggaagaattcaatgctaccctcaaaggcaacctctcgtttgactggtacatcaagacctcgcataaccacctcctgatcgtgagcacagctgagatcttgtttaacgattccgtgttcaccctgctgccgggacagggggcgtttgtgaggtcccagacggagaccaaagtggagccgttcgaggtccccaaccccctgccgctcatcgtgggcagctctgtcgggggactgctgctcctggccctcatcaccgccgcgctgtacaagctcggcttcttcaagcggcaatacaaggacatgatgagtgaagggggtcccccgggggccgaaccccagtagcggctccttcccgacagagctgcctctcggtggccagcaggactctgcccagaccacacgtagcccccaggctgctggacacgtcggacagcgaagtatccccgacaggacgggcttgggcttccatttgtgtgtgtgcaagtgtgtatgtgcgtgtgtgcgagtgtgtgcaagtgtctgtgtgcaagtgtgtgcacgtgtgcgtgtgcgtgcatgtgcactcgcacgcccatgtgtgagtgtgtgcaagtatgtgagtgtgtccagtgtgtgtgcgtgtgtccatgtgtgtgcagtgtgtgcatgtgtgcgagtgtgtgcatgtgtgtgctcaggggctgtggctcacgtgtgtgactcagagtgtctctggcgtgtgggtaggtgacggcagcgtagcctctccggcagaagggaactgcctgggctcccttgtgcgtgggtaagccgctgctgggttttcctccgggagaggggacggtcaatcctgtgggtgaagagagagggaaacacagcagcatctctccactgaaagaagtgggacttcccgtcgcctgcgagcctgcggcctgctggagcctgcgcagcttggatggatactccatgagaaaagccgtgggtggaaccaggagcctcctccacaccagcgctgatgcccaataaagatgcccactgaggaatcatgaagcttcctttctggattcatttattatttcaatgtgactttaattttttggatggataagcctgtctatggtacaaaaatcacaaggcattcaagtgtacagtgaaaagtctccctttccagatattcaagtcacctccttaaaggtagtcaagattgtgttttgaggtttccttcagacagattccaggcgatgtgcaagtgtatgcacgtgtgcacacaccacacacatacacacacacaagcttttttacacaaatggtagcatactttatattggtctgtatcttgctttttttcaccaatatttctcagacatcggttcatattaagacataaattactttttcattcttttataccgctgcatagtattccattgtgtgagtgtaccataatgtatttaaccagtcttcttttgatatactattttcatctcttgttattgcatctgctgagttaataaatcaaatatatgtcaaaaaaaaaaaaaaaaaaaaaaaaaaaaaaaaaaaaaaaaa

SEQ ID NO: 28802 - DNA, 12229 bp, Homo Sapiens
tagcctataatacaaattccaacccacctcatctggggctgctgcctgggctcccatccctgcccggctacatcactgagcacctactactatgtgccagtctccctgcaaaacgctggataaacacgtggctttctaccagggaacctcccgcaaggtatttgacatgctcgcctcccgttctctgctgtgtctaaggattcacagatgcggctggagtctgctgcttagcacagtgagtcgtcattatgggagctattcttcttatcaagaccgcaaatcccctctctggctatccacagccttctgaatgtcccgggcaactccaggggagcagggctggttttctataatcttctaccttactgggtggtctttggggtctggcgggttccagtcccagaggagctcgaagggtccctccaacaggggaagaggagtcccaggtgggtcctggccagggcctctgggcaggctctgagggcgggcttggggactgtggccagcaaagcccctgagtcgatgcctcagccctctcgctccctggtctggcctctctctggcaccaatgcgctgtgggattttgcggaaagagccgctcttctctgagcctcagtttctccagctatcatagggaaagcctggccttgtaccttgagcacagtcggggtatcgcaatggaaaactcttggcaaactgtaaagtgtagttcgcgtgtgtgtgggcacagccacctgggggtccacggtgcggggcacacggtgcgggtgcggtgtcgccgcgcacccggctcgggctcggtcccgccccgcttcccggtccctggtccgctctccctccctccttcccgccctccctgccttcgggaacgccggctcccgatgccgcgcgctgacagccttataaatagtcgcctttgccggccgccgcgaggacgggcagggcacgcactggccccggcgcccacccgcacccctccccaggtcagtgcgtgcccgcgcgtgtctgggggggcgcctctgcggggaggggcagcggcaccgggggagggcgggggcgtcctggtgcggggctccctgggggctgtgccggctgtgtatccgtggttgtgatccgtgtgtgtttgcgtggctgtgttccccgggcgctggggatctgtgcctcgctgcctgtgcctttgtggatccgtgcgtgtgtgtgcgtgtgtgtttgtgtgtgttgcagccccttccagcctccgagatagtcacccctttgttctggctggcactcccggggctccaggtcactgcccttggcatgtcccagcttgggcccagagagggagagctgtggcctggctccctgccccagaggacctggacaggggcagcctctgtgctccgtaggctatcgtgtcactccacttctagtgctgggtgcattggagaacaccccctggatgctcagagcttgccctagcctcctgaccagggccagcgcttggggccttcccacagcactgctcagtggccgcctggtactcctcagcagcagcaggacaggcccagagaggggacaccaactgccccaaggtcacacagctgagtgatggagctgggattcgaaccctagtcagttgccacccactgggaaccgactacgttgggtcagaagctgggagacctgggcttgccttggccttgtcttgtgattggggttaagtcaccgtccctctgggcttcggccccacaggccccttagcagaccatccagtcatattaggagtcgctggggccttgacccaggggccttataaggcctgggtgcttagcccgtaacccaactccatcctagacccctgtcctctgtgaggcctcctcacgacccaagttattttggatcaaggaagtggcaggtgccatcagggcggagggggcttagattaccaggaggggggcggggcagggcggggtcgaggccacttctcagggcttcactgtggttgtccctggcccaggacgctccccctcccatgggcagctgctgaggggcacttggcagctcctacccccctgaagcacactcagcaggaaaagtggctgccactcctgcctggggcagcaggggcatcagcaaagccacttcagctgctactgggtgccaggcccagcgtagcagaaactcagggccgagttggaccctagctggccctcgaaccagtctgtcctcctccccatgcctcagtttcctcccaagatggcagtgaggatggaacgaggctccccagccctgtgctcagcccatgccaggcccagtcaatgggatcccaggcccgcagcacagaagaggggcccagtacagcgtggttgtgcagtgcagggcaggtttccaggaggcacctgccagtgtgggagtggagggcagagtccaggaagacttcctgaaggaggtggcacctgagctgagtcccacacaatagcaaggtggggaaaggcatccaggcattgggtacaacatctgccagtggcagctgatagggttgcagagggcagcagaggtcagctcaccgggacctatccactatgtcaaggggcccaggctttgtctgggagccgagaggccacacatgcaaggttgtaagcgggtgtgtgatgtggtctgatacttgccagagaaaatcctgcaaattgcgtggcagggtgtggaggcttcaaggcccatgtggaggcgggggcagtggcccaggccccttgcttagcacaggacatagtggtgaggagacagacggagagagcctggggaggggagggttgggcagtgggtgtgcagggctgtggagaggagagaggagccttcacactgactcagcctgtggcttgccataggggctggagctgggacttggggagggctgttcagagcctgagaagcctgtggggcttctggggcctgtctcgggggcatggatgtctggggctggagagaaaggcctgggctgcctgcacagggatgggggtccttggagcctgaagccaagtagagagggtggtgtgggtgccttgggtggaggtcccggtgcggtggggtcgctggctggaggtcaaggctggaggggagtgtggctgtggtggttgcgagtggccttggggagggctggtggctgggagtgaagaagtggaggccaaaggtgtccagagggcagttctgagataggggggcgaggtaggggaggtcctgggggctgtggcagcacagggtggggtcgcaggtgtgattgggctcatgggcaggctgagggcaaggtgggggcagtaaagccaggtcctcaaagggtgggggtgcaggggacatgcgtggggctggttgttgggcctgtagaggtgaagagcctgggaccgcctcactttgacaactgtaaagggctgtgttcatgcgagcggctcctgtagattccttcaccccaggcctctgtcccttagaggatccccatccaaacctcatcccagacacacatagttcctggccacctcccacctcctggcagcttccctctggccctggggagcgttgtcaaggtgtctgggcagacgctggccccgcgccctgttttctgggagtttcgaggggagcagctctgcagttgtgtggccgctgtttatgtccctcgtgccatcctcactgtcccagcccctccagcgggaacccaggtggatgggagggggctactgcttctgtgacaggtgaggccatggaggccagagaggaaaggtgacttttccaaggtcactttcccaaggtggctttctcagggaaggggtcctgggccttccctgcccccagcagccccctctgccctcagactgcatgtcgggcctggcacacaccagttgccttgggtgtggcttagtggaaggtgagtcagggtgaggaggaaaatccctccccaacctgtgcccttgtcttacagagcactgacacggctcccgggacctcggcaggatggaaggtatgagcctcctctccttttgcccattgcctgggcctcagtgtgcctgactattaagggggtgcgctctcagggagacattctgggaggggttggaggaggctctggggctgccggagggggcctggctgggagcctccagtatcctcctctggcctctcacgggatgtgccagctccaagattaattttagacgtgacgaggcctccccaaggctcctgagggccccagcgcacaccccctatgctgggtttatagagctgagaccctgccccatggagaggccacagatacacaaaacaccaggtctaatgaggacaaggcaattccccgtacctctccgggactcagtttccctatcatccagtgagggtgggccttgaggaagtcttggaccctcctagttcctatgggctgggacttagagggagacacgggcaggcagagagtccagaacgggcccgccctcagctgctggcagcaccatccgtccagttcctggcactgtgccttggcctgggcagctcttaaagacacccagcgggcctgctgctgctgctgctgctgctctgcctgagctccaaatatcaacagccatagggctgcggccactgcacccccgggataggggcccacaggaggagcccttcttgacagctcctgtagggctccagcttatggtgagggcccctgggagccgcccagccacctcctccctggggaaggggcagagaaccagagaggggcaggcctttcctaaggtcacacagcaaggtgggatacagcctggtcctctatttccctgggaagcgggggagcctgaaagcccagtggggagcttgggttctggttttggttctgacatcccttgagcaggccttccctctctcgagctcagtttccctctgcccagtggggctgtggccttgctgggatctaacagcaggcaggacgagacagaggttggagccaagctcaccgccctctctgggcaagagttccacatgcccaccacagccctccaccccggcaactgtctccatggcaacatatgttgtggttgctaagcccccactgccgggggaggcgggtgatgggccggcccagggcctgagaggggaagggcagggtgcacaggagacacggcaggacgggaccatgggctgctgctcctcgagtgacccccgcagagaagacgatctgagagccagaggtgaccggccccggggtccaggcacccacagggaggcgccatgagggctggcggcccagcccgctggctgtgtggagagtacttagcctttaggcttttgcctctgcccgtctggctgcctggagcaccctcccttccctgacctctcccaggctccgagctcactcacatccctgctgactctgggctgtgacttgtctgcctccctgacaggagcgccagcggtgtctgtccctccgcctggggcccagcacaggcctgggactccagaggtgcctctggctgtgggtccagcgagtgactgagccctgctccccttttctctcccgcagagaagctgaagaaaaccaagatcatctttgtggtgggtgagttgcgggcaggcgggtggtgcagcaagggtcttcactggcactggagggagcccgggcctggggctgcaccctgggctctgcccctccctctctgggagaccctggcagcccctgttcctcctgggaccctgtgtctcggggtttatgaatgggtgggcgtttgcaggtgggcctggctcagggaagggcacccagtgtgagaagatcgtgcagaagtatggctacacccacctctccaccggggacctcctgcggtccgaggtcagctcaggctcggccaggggcaagaagctgtcggaaatcatggagaaggggcagctggttccactggtgagtgggccctggtggggtgagaggcaggggatgacagtagccctgagtgggtgtcccaccagcagcaaagcccacggcacacaggcaaagctgaccgtaaccgcccccggctccaaacccttctgtggttccccattgccctggacagaaagttccttccagaagctcccaagaccttgcaggactctgccctgcccccaactctctcccttccctccatccttcagccaccctggcctctgtcccctcagactagccatactccttccagcctggaatattctttcctcttcagctttcagacttccctaactccccagatttggcctaagacctccccccccaattttctactccagaagccccacttctctgcccgtacaacctgtgccatgcttagaaatggagaaatcatctgtggaatgtgtctgtcccctcaccagcccctgagctccccagggcagggaaggcctaattggtccatggccgtgtcctcgggacccaggacagcacctggctggaaggagggtctcagtgaatactgttgagtgaatgcatcattcattcattcattcactcagtccaggtctccacaattccgaggaagcttcctggagggggaggcttgtttgggacatttgtgttggggagagggcatttcaggtggcaggagcagcgtgacgagaggctgggagaagggatggggaggagaggctcatggccccttcctcctttgctgtgccccaggagacagtgttggacatgctccgggatgccatggtggccaaagtcaatacttccaaaggcttcctgattgatggctacccgcgggaggtgcagcaaggagaagagtttgagcgacgggtaaggcactgacccaagtggggatcctggtgggctggggcaggataagactcccatccccatgggcgggcctgcgggggctgtgatgcaggtcagagttctgagcagaggctgattcatggagtgtgggtgaggaggaaaaccaggaagactttctggaagtgtagaagaaaatgtgtagaaggggaagcgccaggaggggcagttgccaaacctgggctcagattccagctcaacggcttgagatcttgggccagtcattctgcctcctgaacctcagttttcccatctgcaaaatgcagggagtgggaggaccaggtcacagctgccttaagggacagtgtggggactggagaggatgtgcccttccagtgtgggccttggctccctataaacacacagaggggcagggaacagcactggcagggctggaaaggcaaggccagtgtggggagaacagaatatgtgggcaggacaacaagggaggttccagcctggctggaggctgcaaatgccataaagggacatcagtctccttccaggggtcatgaggagcctggctggaaagagcaggcctggaaaatgatggccctgagcttcctagcacgagcatcctgcagatacaccttccccaggatggcaccccacacacgcacacacgtggacgcttgccacatacacatgcacaagccccacaagttcatacacacaaggccaggggcatgtgcacacatcgacacacacggcagtggatactcactcctgcacatgcatgtcacggacgcagcacacatatgcaggaatgcacacgtgctcgcaacatggccctgtgcacacacatacacttttacctcggtgtcacaaggctgtatgggagaaataaacgggactgcaagggcctaggagggagaggtcggcaagggctagggggagcctaaccagcatcctggtgggctggggcaggataagactcccatccccgtgccccatccccatgccccattcccatgccccgtctcgtagggccttctgggcttccgtagcttccagcctcatctggggataggaggccatattttctgacctccgagtggctgctgagtggctgcaagacctcaggaaagtgtctaccccactctgcccctcaccttccctatctgaaatgggggttagctgggattccttcagacctcagacccctgaccctgtgttaggtgccacagttctgaaagatgtcctggcctggctcacacataccagctgtgtggtaccacctgtgaccctcagggccacatctagaaaatagagttaatgaaagtcggccgggtgcagtggctcacgcctgagatcctagcactttgggaggccaaagagggcagatcacttgaggtcagggtcaaaaccagcctggccaacatggtgaaaactcatgtactaaaaatacaaaaattagccaggcatggtggcgggcgcctgtaatcccagctactcaggaggctgagacacgagaatcatttgaacctggctggacggaggttgcagtgagccaagatcacgccattgcactcaagcctgaacaacagaatgagactccgtctcaaaaaaaaaaaaaaaaaaaagtccccacccttccagggctgttgtaggtgccgctgagggccgcagctcagccctggtcccatccctgctgtggcctccaggtgtccgggcagctggtcttcttggctctggacaccagggggcgccagggcttcaccgaagagggagggtcagcctggaagtgtggccggctcacacccaaagcttttctggagactggcagctgccgttgtggactccccgggctagatgtccattgtcctgacagggagactgaggccccacagccagaatctcaagcccagaggctgagctggctctcccagatttaccacctctgctgggtgtgtgtaaagagcctactgtgcttggtcctggagacccagatgaaccagagactgtgagtctgtgccctggaggagctcagcagctgatggatgatgatggggggtgggtgaccttgaagttgaggtcagactgctgcatccaggcccagcctttgcccccatggtaatctgtaaggtagaagcagccgctgggtggtacggagtcatctccctgaaggcagctgacgctgtcaccctgaatccttaactacggaggagctagggatgagcgctaggatgggtatcgcaggcgaggacaaagggcttgccccaggtcacacagctgaacagaggcaggggtgagcctgggtccaggtcagtctgacgccggaggtcaggctgcttctcgcctctgtccagctgtgtggccttggacaagcctcttggttacacagctggacagaggcacgaaacagcctgacctgagaggcagtgccccaaggccttgacaggggtccagggccaaacgtgcgcagaaacccttgggggctggcccaggcagttggaagcaggagacagggtttgaaggtcccaatcccattcctaaagctgtggcagtcatgggtgactctggggtgctctgccctcccaaccaggcagctgtggtagctggattgagcgaggcaggggctgcagaaccttattcctcttgcctttccaaggcgtcccatggatgacatggatgacatgctgttccaatgacacggacattgctcagaaccccccaggactcagcagcccctcaccccttccctcatcccttgttcctttgtcaaaggaccccagaattgtgagacaagtgcctccctgccctcagggcccttgggagacctgcttaaggaaagataaaggcgctggaagagctgttccaggaggcggggagtactggggggcggggggtggcatcagagagactgccctgaggaagtgagcttcgcactgaaacctgatgcttggtattgaggtgaaggcgagttaggatcaggctcgggggagagggctcctagcagagggaacagcatgagcacaggtctggcatggaaggaggttgatgagagcctagagcagagagagtcaggctctctcagtctggcaagtagtgtggactttctcctgagggcactggggagccatggtgtaggtttgagcaggggagtggcaggaaagattggttttaggaaggtctttcaggctgccttggggaagggattgaaggtctgagggggtatctactggggcttcatagatgggaagatggggaggacatggccctagggggcaggaatggggtccctgtgacatggtgcccgcctgcagattggacagcccacactgctgctgtatgtggacgcaggccctgagaccatgacccagcggctcttgaaacgtggagagaccagcgggcgtgtggacgacaatgaggagaccatcaaaaagcggctggagacctattacaaggccacagaacccgtcatcgccttctatgagaaacgtggcattgtgcgcaaggtgggccccgcgggacggggcagctccgggaagaacgggttcctatgtggctccgcctcagctcactgtgtggcctcaggccagcccctctctctgggccttggtttccccactggttcaatgaggggctgctgtcaattaggttgggctcggggaggcaggcctggtctctggggcctgccatggtgaggcccaccccactccacctggtgactcagcctcacggcccatctccccacaggtcaacgctgagggctccgtggacagtgtcttctcccaggtctgcacccacctggacgccctaaagtagcaacgctggagccgcttccccagctcagagccccgccccaccccgtcctgattagaggtcctcctggcctgagcgcagcgcctccaccctgccctgctgagcacagacggaggaagccgcttatcctgttttcatggacagctgagcactaaaggaatttctaaggacatttggttttactgctttttctctgcttccagttggagttgattcatgtgcttgtgcctacctggccgcaagtccccagcccctcaaccctccgttcctcctcagcctccctttgccagccacccctcctctagctctggtgggaggcccggggcccttcctcgcacagggcatgcctggcctgaggacccggcgctgagtggcggggcccctgctccgaggggctcatgttcaggcagaaccggtcccagcctgggctcctctgcatcttgctctgtgccttggccctgacccccatcgctctgagcatatgttccatgcctgccttgccggggcctggactgcacaggcagcaaggtcatggtctgagtggggcttcctgggcagttggggcggcccacgccagctggcccagtgggtagtgaattggcttccttgacgcgagaggctctgagggtctgaaaagggcatctcaatggcatgggtgggtggggagtcagtcatgtcactgaaattgaatgggggaggcccaatgaggtggctcatgcctgtaatcccagcactttgggaagctgaggcaggaggatcacctgaggtcaggagttcgagagcagcctggccaacatggcaaaaccccttatttactaaaaatacaaaaacttagccgggcatggtggcatgtgcctgtattcccagctactcatgaggctgaggcaggagaatggcgtgaacccgggagtggagcttgcaatgagccaagattgcgccactgcactccagcctgggtgacagagcaagactccgtctcaaaaaaaaaaaaaaaaaaaaagaaattaattgggggagtcatggtcaggggtgagacctgaaggacctccccctgtgtggccctggacacagcccaccctctgtgagccgtttccaattctaaaacagactcaatgtccccctcacccccacctcaaggtcaggatgcgaacacactgagtgaggagtggacgctgtccattgccacggccatgagggctggagaccagaacagcatggcccgaagcgtgcggggccccggatgacttggggacaccccagaatcccctggggagaacccttcctgcgcgctttcattttttgacctcatcactgagaaaggctcaatttggtgctcacgtgtccttaacacctgatctggcccaagctgcgtgccctttaagccaagagagcctcttgtggaccccgcctgcccgaatgaaatccgaacagttggggctgttatggcaagtggggctggtttttcatttccattggttatttaaagtttcctttaaaataaacgattttaagttataaaaggtgaatctattgaaagaagaacatcaaagaaataaacaggagttcagcggagtagcagaagacaaggcatgtagggggagccattctgtcccagggaagttgtggagggtaggggctgtgtggaggcctctgcag

SEQ ID NO: 28803 - DNA, 3528 bp, Homo Sapiens
gcggccgcgggctcgcgctcctcgccaggccctgccgccgggctgccatccttgccctgccatgtctcgccggaagcctgcgtcgggcggcctcgctgcctccagctcagcccctgcgaggcaagcggttttgagccgattcttccagtctacgggaagcctgaaatccacctcctcctccacaggtgcagccgaccaggtggaccctggcgctgcagcggctgcagcggccgcagcggccgcagcgcccccagcgcccccagctcccgccttcccgccccagctgccgccgcacgtagctacagaaattgacagaagaaagaagagaccattggaaaatgatgggcctgttaaaaagaaagtaaagaaagtccaacaaaaggaaggaggaagtgatctgggaatgtctggcaactctgagccaaagaaatgtctgaggaccaggaatgtttcaaagtctctggaaaaattgaaagaattctgctgcgattctgcccttcctcaaagtagagtccagacagaatctctgcaggagagatttgcagttctgccaaaatgtactgattttgatgatatcagtcttctacacgcaaagaatgcagtttcttctgaagattcgaaacgtcaaattaatcaaaaggacacaacactttttgatctcagtcagtttggatcatcaaatacaagtcatgaaaatttacagaaaactgcttccaaatcagctaacaaacggtccaaaagcatctatacgccgctagaattacaatacatagaaatgaagcagcagcacaaagatgcagttttgtgtgtggaatgtggatataagtatagattctttggggaagatgcagagattgcagcccgagagctcaatatttattgccatttagatcacaactttatgacagcaagtatacctactcacagactgtttgttcatgtacgccgcctggtggcaaaaggatataaggtgggagttgtgaagcaaactgaaactgcagcattaaaggccattggagacaacagaagttcactcttttcccggaaattgactgccctttatacaaaatctacacttattggagaagatgtgaatcccctaatcaagctggatgatgctgtaaatgttgatgagataatgactgatacttctaccagctatcttctgtgcatctctgaaaataaggaaaatgttagggacaaaaaaaagggcaacatttttattggcattgtgggagtgcagcctgccacaggcgaggttgtgtttgatagtttccaggactctgcttctcgttcagagctagaaacccggatgtcaagcctgcagccagtagagctgctgcttccttcggccttgtccgagcaaacagaggcgctcatccacagagccacatctgttagtgtgcaggatgacagaattcgagtcgaaaggatggataacatttattttgaatacagccatgctttccaggcagttacagagttttatgcaaaagatacagttgacatcaaaggttctcaaattatttctggcattgttaacttagagaagcctgtgatttgctctttggctgccatcataaaatacctcaaagaattcaacttggaaaagatgctctccaaacctgagaattttaaacagctatcaagtaaaatggaatttatgacaattaatggaacaacattaaggaatctggaaatcctacagaatcagactgatatgaaaaccaaaggaagtttgctgtgggttttagaccacactaaaacttcatttgggagacggaagttaaagaagtgggtgacccagccactccttaaattaagggaaataaatgcccggcttgatgctgtatcggaagttctccattcagaatctagtgtgtttggtcagatagaaaatcatctacgtaaattgcccgacatagggaggggactctgtagcatttatcacaaaaaatgttctacccaagagttcttcttgattgtcaaaactttatatcacctaaagtcagaatttcaagcaataatacctgctgttaattcccacattcagtcagacttgctccggaccgttattttagaaattcctgaactcctcagtccagtggagcattacttaaagatactcaatgaacaagctgccaaagttggggataaaactgaattatttaaagacctttctgacttccctttaataaaaaagaggaaggatgaaattcaaggtgttattgacgagatccgaatgcatttgcaagaaatacgaaaaatactaaaaaatccttctgcacaatatgtgacagtatcaggacaggagtttatgatagaaataaagaactctgctgtatcttgtataccaactgattgggtaaaggttggaagcacaaaagctgtgagccgctttcactctccttttattgtagaaaattacagacatctgaatcagctccgggagcagctagtccttgactgcagtgctgaatggcttgattttctagagaaattcagtgaacattatcactccttgtgtaaagcagtgcatcacctagcaactgttgactgcattttctccctggccaaggtcgctaagcaaggagattactgcagaccaactgtacaagaagaaagaaaaattgtaataaaaaatggaaggcaccctgtgattgatgtgttgctgggagaacaggatcaatatgtcccaaataatacagatttatcagaggactcagagagagtaatgataattaccggaccaaacatgggtggaaagagctcctacataaaacaagttgcattgattaccatcatggctcagattggctcctatgttcctgcagaagaagcgacaattgggattgtggatggcattttcacaaggatgggtgctgcagacaatatatataaaggacggagtacatttatggaagaactgactgacacagcagaaataatcagaaaagcaacatcacagtccttggttatcttggatgaactaggaagagggacgagcactcatgatggaattgccattgcctatgctacacttgagtatttcatcagagatgtgaaatccttaaccctgtttgtcacccattatccgccagtttgtgaactagaaaaaaattactcacaccaggtggggaattaccacatgggattcttggtcagtgaggatgaaagcaaactggatccaggcacagcagaacaagtccctgattttgtcaccttcctttaccaaataactagaggaattgcagcaaggagttatggattaaatgtggctaaactagcagatgttcctggagaaattttgaagaaagcagctcacaagtcaaaagagctggaaggattaataaatacgaaaagaaagagactcaagtattttgcaaagttatggacgatgcataatgcacaagacctgcagaagtggacagaggagttcaacatggaagaaacacagacttctcttcttcattaaaatgaagactacatttgtgaacaaaaaatggagaattaaaaataccggaattc

SEQ ID NO: 28804 - DNA, 5185 bp, Homo Sapiens
gggaacttggattaggtggagaggcagttggggggcctcgttgttttgcgtcttagttccgccctcctgtccatcaggagaaggaaaggataaaccctgggccatgaggctacccctgctcctggtttttgcctctgtcattccgggtgctgttctcctactggacaccaggcaatttttaatctataatgaagatcacaagcgctgcgtggatgcagtgagtcccagtgccgtccaaaccgcagcttgcaaccaggatgccgaatcacagaaattccgatgggtgtccgaatctcagattatgagtgttgcatttaaattatgcctgggagtgccatcaaaaacagactgggttgctatcactctctatgcctgtgactcaaaaagtgaatttcagaaatgggagtgcaaaaatgacacacttttggggatcaaaggagaagatttattttttaactacggcaacagacaagaaaagaatattatgctctacaagggatcgggtttatggagcaggtggaagatctatggaaccacagacaatctgtgctccagaggttatgaagccatgtatacgctactaggcaatgccaatggagcaacctgtgcattcccgttcaagtttgaaaacaagtggtacgcagattgcacgagtgctgggcggtcggatggatggctctggtgcggaaccactactgactatgacacagacaagctatttggatattgtccattgaaatttgagggcagtgaaagcttatggaataaagacccgctgaccagcgtttcctaccagataaactccaaatccgctttaacgtggcaccaagcgaggaaaagctgccaacaacagaacgctgagctcctgagcatcacagagatacatgagcaaacatacctgacaggattaaccagttccttgacctcaggactctggattggacttaacagtctgagcttcaacagcggttggcagtggagtgaccgcagtcctttccgatatttgaactggttaccaggaagtccatcagctgaacctggaaaaagctgtgtgtcactaaatcctggaaaaaatgctaaatgggaaaatctggaatgtgttcagaaactgggctatatttgcaaaaagggcaacaccactttaaattcttttgttattccctcagaaagtgatgtgcctactcactgtcctagtcagtggtggccgtatgccggtcactgttacaagattcacagagatgagaaaaaaatccagagggatgctctgaccacctgcaggaaggaaggcggtgacctcacaagtatccacaccatcgaggaattggactttattatctcccagctaggatatgagccaaatgacgaattgtggatcggcttaaatgacattaagattcaaatgtactttgagtggagtgatgggacccctgtaacgtttaccaaatggcttcgtggagaaccaagccatgaaaacaacagacaggaggattgtgtggtgatgaaaggcaaggatgggtactgggcagatcggggctgtgagtggcctcttggctacatctgcaagatgaaatcacgaagccaaggtccagaaatagtggaagtcgaaaaaggctgcaggaaaggctggaaaaaacatcacttttactgctatatgattggacatacgctttcaacatttgcagaagcaaaccaaacctgtaataatgagaatgcttatttaacaactattgaagacagatatgaacaagccttcctgactagtttcgttggcttaaggcctgaaaaatatttctggacaggactttcagatatacaaaccaaagggacttttcagtggaccatcgaggaagaggttcggttcacccactggaattcagatatgccagggcgaaagccagggtgtgttgccatgagaaccgggattgcagggggcttatgggatgttttgaaatgtgatgaaaaggcaaaatttgtgtgcaagcactgggcagaaggagtaacccacccaccgaagcccacgacgactcccgaacccaaatgtccggaggattggggcgccagcagtagaacaagcttgtgtttcaagctgtatgcaaaaggaaaacatgagaagaaaacgtggtttgaatctcgagatttttgtcgagctctgggtggagacttagctagcatcaataacaaagaggaacagcaaacaatatggcgattaataacagctagtggaagctaccacaaactgttttggttgggattgacatatggaagcccttcagaaggttttacttggagtgatggttctcctgtttcatatgaaaactgggcttatggagaacctaataattatcaaaatgttgaatactgtggtgagctgaaaggtgaccctactatgtcttggaatgatattaattgtgaacaccttaacaactggatttgccagatacaaaaaggacaaacaccaaaacctgagccaacaccagctcctcaagacaatccaccagttactgaagatgggtgggttatttacaaagactaccagtattatttcagcaaagagaaggaaaccatggacaatgcgcgagcgttttgcaagaggaattttggtgatcttgtttctattcaaagtgaaagtgaaaagaagtttctatggaaatatgtaaacagaaatgatgcacagtctgcatattttattggtttattgatcagcttggataaaaagtttgcttggatggatggaagcaaagtggattacgtgtcttgggccacaggtgaacccaattttgcaaatgaagatgaaaactgtgtgaccatgtattcaaattcagggttttggaatgacattaactgtggctatccaaacgccttcatttgccagcgacataacagtagtatcaatgctaccacagttatgcctaccatgccctcggtcccatcagggtgcaaggaaggttggaatttctacagcaacaagtgtttcaaaatctttggatttatggaagaagaaagaaaaaattggcaagaggcacgaaaagcttgtataggctttggagggaatctggtctccatacaaaatgaaaaagagcaagcatttcttacctatcacatgaaggactccactttcagtgcctggactgggctgaatgatgtcaattcagaacacacgttcctttggacggatggacgaggagtccattacacaaactgggggaaaggttaccctggtggaagaagaagcagtctttcttatgaagatgctgactgtgttgttattattggaggtgcatcaaatgaagcaggaaaatggatggatgatacctgcgacagtaaacgaggctacatatgccagacacgatccgacccttccttgactaatcctccagcaacgattcaaacagatggctttgttaaatatggcaaaagcagctattcactcatgagacaaaaatttcaatggcatgaagcggagacatactgcaagcttcacaattcccttatagccagcattctggatccctacagtaatgcatttgcgtggctgcagatggaaacatctaatgaacgtgtgtggatcgccctgaacagtaacttgactgataatcaatacacttggactgataagtggagggtgaggtacactaactgggctgctgatgagcccaaattgaaatcagcatgtgtttatctggatcttgatggctactggaagacagcacattgcaatgaaagtttttactttctctgtaaaagatcagatgaaatccctgctactgaacccccacaactgcctggcagatgcccggagtcagatcacacagcatggattcctttccatggtcactgttactatattgagtcctcatatacaagaaactggggccaagcttctctggaatgtcttcgaatgggttcctctctggtttccattgaaagtgctgcagaatccagttttctgtcatatcgggttgagccacttaaaagtaaaaccaatttttggataggattgttcagaaatgttgaagggacgtggctgtggataaataacagtccggtctcctttgtcaactggaacacaggagatccctctggtgaacggaatgattgtgtagctttacatgcgtcttctgggttttggagtaatattcactgttcttcctacaaaggatatatttgtaaaagaccaaaaattattgatgctaaacctactcatgaattacttacaacaaaagctgacacaaggaagatggacccttctaaaccgtcttccaacgtggccggagtagtcatcattgtgatcctcctgattttaacgggtgctggccttgccgcctatttcttttataagaaaagacgtgtgcacctacctcaagagggcgcctttgaaaacactctgtattttaacagtcagtcaagcccaggaactagtgatatgaaagatctcgtgggcaatattgaacagaatgaacactcggtcatctagtacctcaatgcgattctgagatatttgaatttcataaaattgtaactgaaatttaaaatttttagttcaatgtgattgttttctttaaaatgagtactgaattgtactggtctgtccttttttcctttgcctaattgaagaaataattgcttgttttctagcctggcaagatattttcataaaagagggataacaatgctgattactaccttttaaaatattttagataaatgcacagcaccacagcaccacatctaagcattagtgatgggtagctgatgtcagcttcatgtggattttaagcactctagaaacaatgaagcttcttggcatattttaaggagctcccaaaatgtgttacctattaaattgtaactcagcaagtagaagaccatttgaaaagtcaggtacaaatttcctcaagtggcataaaaatgtagtcagttttctcttttaccagtttttatttccactccaattatttagaactttatttgtacatgtgcagaagaataaggcagctgagaatcttgtttcccccaagagagttttacaggctgagtgttgcaaatgtgttctttgtcctgttatatgtatatcaggaatacaaggatgtgaaataaaactgtaaatttgcataactggatgtacttagataatgtgaaataaacattaaagacaaggtctatttttaataaaaaaaaaaaaaaa

SEQ ID NO: 28805 - DNA, 5067 bp, Homo Sapiens
ctcctccccatcctctccctctgtccctctgtccctctgaccctgcactgtcccagcaccatgggacccacctcaggtcccagcctgctgctcctgctactaacccacctccccctggctctggggagtcccatgtactctatcatcacccccaacatcttgcggctggagagcgaggagaccatggtgctggaggcccacgacgcgcaaggggatgttccagtcactgttactgtccacgacttcccaggcaaaaaactagtgctgtccagtgagaagactgtgctgacccctgccaccaaccacatgggcaacgtcaccttcacgatcccagccaacagggagttcaagtcagaaaaggggcgcaacaagttcgtgaccgtgcaggccaccttcgggacccaagtggtggagaaggtggtgctggtcagcctgcagagcgggtacctcttcatccagacagacaagaccatctacacccctggctccacagttctctatcggatcttcaccgtcaaccacaagctgctacccgtgggccggacggtcatggtcaacattgagaacccggaaggcatcccggtcaagcaggactccttgtcttctcagaaccagcttggcgtcttgcccttgtcttgggacattccggaactcgtcaacatgggccagtggaagatccgagcctactatgaaaactcaccacagcaggtcttctccactgagtttgaggtgaaggagtacgtgctgcccagtttcgaggtcatagtggagcctacagagaaattctactacatctataacgagaagggcctggaggtcaccatcaccgccaggttcctctacgggaagaaagtggagggaactgcctttgtcatcttcgggatccaggatggcgaacagaggatttccctgcctgaatccctcaagcgcattccgattgaggatggctcgggggaggttgtgctgagccggaaggtactgctggacggggtgcagaacctccgagcagaagacctggtggggaagtctttgtacgtgtctgccaccgtcatcttgcactcaggcagtgacatggtgcaggcagagcgcagcgggatccccatcgtgacctctccctaccagatccacttcaccaagacacccaagtacttcaaaccaggaatgccctttgacctcatggtgttcgtgacgaaccctgatggctctccagcctaccgagtccccgtggcagtccagggcgaggacactgtgcagtctctaacccagggagatggcgtggccaaactcagcatcaacacacaccccagccagaagcccttgagcatcacggtgcgcacgaagaagcaggagctctcggaggcagagcaggctaccaggaccatgcaggctctgccctacagcaccgtgggcaactccaacaattacctgcatctctcagtgctacgtacagagctcagacccggggagaccctcaacgtcaacttcctcctgcgaatggaccgcgcccacgaggccaagatccgctactacacctacctgatcatgaacaagggcaggctgttgaaggcgggacgccaggtgcgagagcccggccaggacctggtggtgctgcccctgtccatcaccaccgacttcatcccttccttccgcctggtggcgtactacacgctgatcggtgccagcggccagagggaggtggtggccgactccgtgtgggtggacgtcaaggactcctgcgtgggctcgctggtggtaaaaagcggccagtcagaagaccggcagcctgtacctgggcagcagatgaccctgaagatagagggtgaccacggggcccgggtggtactggtggccgtggacaagggcgtgttcgtgctgaataagaagaacaaactgacgcagagtaagatctgggacgtggtggagaaggcagacatcggctgcaccccgggcagtgggaaggattacgccggtgtcttctccgacgcagggctgaccttcacgagcagcagtggccagcagaccgcccagagggcagaacttcagtgcccgcagccagccgcccgccgacgccgttccgtgcagctcacggagaagcgaatggacaaagtcggcaagtaccccaaggagctgcgcaagtgctgcgaggacggcatgcgggagaaccccatgaggttctcgtgccagcgccggacccgtttcatctccctgggcgaggcgtgcaagaaggtcttcctggactgctgcaactacatcacagagctgcggcggcagcacgcgcgggccagccacctgggcctggccaggagtaacctggatgaggacatcattgcagaagagaacatcgtttcccgaagtgagttcccagagagctggctgtggaacgttgaggacttgaaagagccaccgaaaaatggaatctctacgaagctcatgaatatatttttgaaagactccatcaccacgtgggagattctggctgtcagcatgtcggacaagaaagggatctgtgtggcagaccccttcgaggtcacagtaatgcaggacttcttcatcgacctgcggctaccctactctgttgttcgaaacgagcaggtggaaatccgagccgttctctacaattaccggcagaaccaagagctcaaggtgagggtggaactactccacaatccagccttctgcagcctggccaccaccaagaggcgtcaccagcagaccgtaaccatcccccccaagtcctcgttgtccgttccatatgtcatcgtgccgctaaagaccggcctgcaggaagtggaagtcaaggctgccgtctaccatcatttcatcagtgacggtgtcaggaagtccctgaaggtcgtgccggaaggaatcagaatgaacaaaactgtggctgttcgcaccctggatccagaacgcctgggccgtgaaggagtgcagaaagaggacatcccacctgcagacctcagtgaccaagtcccggacaccgagtctgagaccagaattctcctgcaagggaccccagtggcccagatgacagaggatgccgtcgacgcggaacggctgaagcacctcattgtgaccccctcgggctgcggggaacagaacatgatcggcatgacgcccacggtcatcgctgtgcattacctggatgaaacggagcagtgggagaagttcggcctagagaagcggcagggggccttggagctcatcaagaaggggtacacccagcagctggccttcagacaacccagctctgcctttgcggccttcgtgaaacgggcacccagcacctggctgaccgcctacgtggtcaaggtcttctctctggctgtcaacctcatcgccatcgactcccaagtcctctgcggggctgttaaatggctgatcctggagaagcagaagcccgacggggtcttccaggaggatgcgcccgtgatacaccaagaaatgattggtggattacggaacaacaacgagaaagacatggccctcacggcctttgttctcatctcgctgcaggaggctaaagatatttgcgaggagcaggtcaacagcctgccaggcagcatcactaaagcaggagacttccttgaagccaactacatgaacctacagagatcctacactgtggccattgctggctatgctctggcccagatgggcaggctgaaggggcctcttcttaacaaatttctgaccacagccaaagataagaaccgctgggaggaccctggtaagcagctctacaacgtggaggccacatcctatgccctcttggccctactgcagctaaaagactttgactttgtgcctcccgtcgtgcgttggctcaatgaacagagatactacggtggtggctatggctctacccaggccaccttcatggtgttccaagccttggctcaataccaaaaggacgcccctgaccaccaggaactgaaccttgatgtgtccctccaactgcccagccgcagctccaagatcacccaccgtatccactgggaatctgccagcctcctgcgatcagaagagaccaaggaaaatgagggtttcacagtcacagctgaaggaaaaggccaaggcaccttgtcggtggtgacaatgtaccatgctaaggccaaagatcaactcacctgtaataaattcgacctcaaggtcaccataaaaccagcaccggaaacagaaaagaggcctcaggatgccaagaacactatgatccttgagatctgtaccaggtaccggggagaccaggatgccactatgtctatattggacatatccatgatgactggctttgctccagacacagatgacctgaagcagctggccaatggtgttgacagatacatctccaagtatgagctggacaaagccttctccgataggaacaccctcatcatctacctggacaaggtctcacactctgaggatgactgtctagctttcaaagttcaccaatactttaatgtagagcttatccagcctggagcagtcaaggtctacgcctattacaacctggaggaaagctgtacccggttctaccatccggaaaaggaggatggaaagctgaacaagctctgccgtgatgaactgtgccgctgtgctgaggagaattgcttcatacaaaagtcggatgacaaggtcaccctggaagaacggctggacaaggcctgtgagccaggagtggactatgtgtacaagacccgactggtcaaggttcagctgtccaatgactttgacgagtacatcatggccattgagcagaccatcaagtcaggctcggatgaggtgcaggttggacagcagcgcacgttcatcagccccatcaagtgcagagaagccctgaagctggaggagaagaaacactacctcatgtggggtctctcctccgatttctggggagagaagcccaacctcagctacatcatcgggaaggacacttgggtggagcactggcctgaggaggacgaatgccaagacgaagagaaccagaaacaatgccaggacctcggcgccttcaccgagagcatggttgtctttgggtgccccaactgaccacacccccattcc

SEQ ID NO: 28806 - DNA, 1563 bp, Homo Sapiens
gagagactggatggacccacaagggtgacagcccaggcggaccgatcttcccatcccacatcctccggcgcgatgccaaaaagaggctgacggcaactgggccttctgcagagaaagacctccgcttcactgccccggctggtcccaagggtcaggaagatggattcatacctgctgatgtggggactgctcacgttcatcatggtgcctggctgccaggcagagctctgtgacgatgacccgccagagatcccacacgccacattcaaagccatggcctacaaggaaggaaccatgttgaactgtgaatgcaagagaggtttccgcagaataaaaagcgggtcactctatatgctctgtacaggaaactctagccactcgtcctgggacaaccaatgtcaatgcacaagctctgccactcggaacacaacgaaacaagtgacacctcaacctgaagaacagaaagaaaggaaaaccacagaaatgcaaagtccaatgcagccagtggaccaagcgagccttccaggtgaagagaagcctcaggcaagccccgaaggccgtcctgagagtgagacttcctgcctcgtcacaacaacagattttcaaatacagacagaaatggctgcaaccatggagacgtccatatttacaacagagyaccaggtagcagtggccggctgtgttttcctgctgatcagcgtcctcctcctgagtgggctcacctggcagcggagacagaggaagagtagaagaacaatctagaaaaccaaaagaacaagaatttcttggtaagaagccgggaacagacaacagaagtcatgaagcccaagtgaaatcaaaggtgctaaatggtcgcccaggagacatccgttgtgcttgcctgcgttttggaagctctgaagtcacatcacaggacacggggcagtggcaaccttgtctctatgccagctcagtcccatcagagagcgagcgctacccacttctaaatagcaatttcgccgttgaagaggaagggcaaaaccactagaactctccatcttattttcatgtatatgtgttcattaaagcatgaatggtatggaactctctccaccctatatgtagtataaagaaaagtaggtttacattcatctcattccaacttcccagttcaggagtcccaaggaaagccccagcactaacgtaaatacacaacacacacactctaccctatacaactggacattgtctgcgtggttcctttctcagccgcttctgactgctgattctcccgttcacgttgcctaataaacatccttcaagaactctgggctgctacccagaaatcattttacccttggctcaatcctctaagctaacccccttccactgagccttcagtcttgaatttctaaaaaacagaggccatggcagaataatctttgggtaacttcaaaacggggcagccaaacccatgaggcaatgtcaggaacagaaggatgaatgaggtcccaggcagagaatcatacttagcaaagttttacctgtgcgttactaattggcctctttaagagttagtttctt

SEQ ID NO: 28807 - DNA, 2565 bp, Homo Sapiens
tgatccttgtgatcccaggctccaagagtccacccttcccagctcagctcagtacctcagccacctccaagatccctacactgatcatgcttttcccaatctccatgtcggccacggagtttcttctggcctctgtcatcttctgtctggtattctgggtaatgagggcctcaagacctcaggtccccaaaggcctgaagaatccaccagggccatggggctggcctctgattgggcacatgctgaccctgggaaagaacccgcacctggcactgtcaaggatgagccagcagtatggggacgtgctgcagatccgaattggctccacacccgtggtggtgctgagcggcctggacaccatccggcaggccctggtgcggcagggcgatgatttcaagggccggcccgacctctacaccttcaccctcatcagtaatggtcagagcatgtccttcagcccagactctggaccagtgtgggctgcccgccggcgcctggcccagaatggcctgaaaagtttctccattgcctctgacccagcctcctcaacctcctgctacctggaagagcatgtgagcaaggaggctgaggtcctgataagcacgttgcaggagctgatggcagggcctgggcactttaacccctacaggtatgtggtggtatcagtgaccaatgtcatctgtgccatttgctttggccggcgctatgaccacaaccaccaagaactgcttagcctagtcaacctgaataataatttcggggaggtggttggctctggaaacccagctgagttcatccctattcttcgctacctacccaacccttccctgaatgccttcaaggacctgaatgagaagttctacagcttcatgcagaagatggtcaaggagcactacaaaacctttgagaagggccacatccgggacatcacagacagcctgattgagcactgtcaggagaagcagctggatgagaacgccaatgtccagctgtcagatgagaagatcattaacatcgtcttggacctctttggagctgggtttgacacagtcacaactgctatctcctggagcctcatgtatttggtgatgaaccccagggtacagagaaagatccaagaggagctagacacagtgattggcaggtcacggcggccccggctctctgacagatcccatctgccctatatggaggccttcatcctggagaccttccgacactcttccttcgtccccttcaccatcccccacagcacaacaagagacacaagtttgaaaggcttttacatccccaaggggcgttgtgtctttgtaaaccagtggcagatcaaccatgaccagaagctatgggtcaacccatctgagttcctacctgaacggtttctcacccctgatggtgctatcgacaaggtgttaagtgagaaggtgattatctttggcatgggcaagcggaagtgtatcggtgagaccgttgcccgctgggaggtctttctcttcctggctatcctgctgcaacgggtggaattcagcgtgccactgggcgtgaaggtggacatgacccccatctatgggctaaccatgaagcatgcctgctgtgagcacttccaaatgcagctgcgctcttaggtgcttgagagccctgaggcctagactctgtctacctggtctggttgggcagccagaccagcaggctggcctatgtggtctaagattcagcctgaaactcatagacactgatctggctgcagttttgctatctgggctgtgggcaagcctaagggatcctgcctgcccctaccctggacttgcctctgcacaccctccagagacaacaggtaaaacagggccacatagatgctgatggagccttcccaagttgtgcttgagccaggaggcctgctagggttaggaggtccttaggcctctgagaagctctgaagaactctctggaagcccctgggcccagtacctagctggctctgtgagggtgctgactggcttcagcaagttagaactagccaaaccaggaccctgtccaatctttgacaattgggagctgccaagagtgaagggaagagacagcccaggatactggcacagaggtagtctcactgcttgaactaggctgagcaatctgaccctatgggtctaggacacagttcctgggaacatcacattcctctgcccttcctgcaggcaggaacaaacagggctgccttctggccttgtaagacccttattgctgtcctggaggggctggggacttgtgtctgcggggatcagagcgcacagggagtgcacatatccaggcaccaggactagggctggagtgaggggggggtatttcaattaccttctattggtctcccttctctacactcttgtaataaaatgtctatttttaatgtttgtacacaacaatccttctattctagcctgcattgagcttgcatgcttgcataagagcttaagaaccattgatttaatgtaatagggaaaattctaacccaggtatccaaaaatgtgtaagaacaactacctgagctaaataaagatattgttcaga

SEQ ID NO: 28808 - DNA, 598 bp, Homo Sapiens
caattcagaagagccacccagaaggagacaacaatgtccctgctacccgtgccatacacagaggctgcctctttgtctactggttctactgtgacaatcaaagggcgaccacttgtctgtttcttgaatgaaccatatctgcaggtggatttccacactgagatgaaggaggaatcagacattgtcttccatttccaagtgtgctttggtcgtcgtgtggtcatgaacagccgtgagtatggggcctggaagcagcaggtggaatccaagaacatgccctttcaggatggccaagaatttgaactgagcatctcagtgctgccagataagtaccaggtaatggtcaatggccaatcctcttacacctttgaccatagaatcaagcctgaggctgtgaagatggtgcaagtgtggagagatatctccctgaccaaatttaatgtcagctatttaaagagataaccagacttcatgttgccaaggaatccctgtctctacgtgaacttgggattccaaagccagctaacagcatgatcttttctcacttcaatccttactcctgctcattaaaacttaatcaaacttcaaaaaaaaaaaa

SEQ ID NO: 28809 - DNA, 9287 bp, Homo Sapiens
gcaacaccaggactcgggctggaggggcgctgggctcggacctgccaaggccaccgcaggggggagcaagggacagaggcgggggtcctagctgacggcttttactgcctaggatgacgctgcggcttctggtggccgcgctctgcgccgggatcctggcagaggcgccccgagtgcgagcccagcacagggagagagtgacctgcacgcgcctttacgccgctgacattgtgttcttactggatggctcctcatccattggccgcagcaatttccgcgaggtccgcagctttctcgaagggctggtgctgcctttctctggagcagccagtgcacagggtgtgcgctttgccacagtgcagtacagcgatgacccacggacagagttcggcctggatgcacttggctctgggggtgatgtgatccgcgccatccgtgagcttagctacaaggggggcaacactcgcacaggggctgcaattctccatgtggctgaccatgtcttcctgccccagctggcccgacctggtgtccccaaggtctgcatcctgatcacagacgggaagtcccaggacctggtggacacagctgcccaaaggctgaaggggcagggggtcaagctatttgctgtggggatcaagaatgctgaccctgaggagctgaagcgagttgcctcacagccaacctccgacttcttcttcttcgtcaatgacttcagcatcttgaggacactactgcccctcgtttcccggagagtgtgcacgactgctggtggcgtgcctgtgacccgacctccggatgactcgacctctgctccacgagacctggtgctgtctgagccaagcagccaatccttgagagtacagtggacagcggccagtggccctgtgactggctacaaggtccagtacactcctctgacggggctgggacagccactgccgagtgagcggcaggaggtgaacgtcccagctggtgagaccagtgtgcggctgcggggtctccggccactgaccgagtaccaagtgactgtgattgccctctacgccaacagcatcggggaggctgtgagcgggacagctcggaccactgccctagaagggccggaactgaccatccagaataccacagcccacagcctcctggtggcctggcggagtgtgccaggtgccactggctaccgtgtgacatggcgggtcctcagtggtgggcccacacagcagcaggagctgggccctgggcagggttcagtgttgctgcgtgacttggagcctggcacggactatgaggtgaccgtgagcaccctatttggccgcagtgtggggcccgccacttccctgatggctcgcactgacgcttctgttgagcagaccctgcgcccggtcatcctgggccccacatccatcctcctttcctggaacttggtgcctgaggcccgtggctaccggttggaatggcggcgtgagactggcttggagccaccgcagaaggtggtactgccctctgatgtgacccgctaccagttggatgggctgcagccgggcactgagtaccgcctcacactctacactctgctggagggccacgaggtggccacccctgcaaccgtggttcccactggaccagagctgcctgtgagccctgtaacagacctgcaagccaccgagctgcccgggcagcgggtgcgagtgtcctggagcccagtccctggtgccacccagtaccgcatcattgtgcgcagcacccagggggtggagcggaccctggtgcttcctgggagtcagacagcattcgacttggatgacgttcaggctgggcttagctacactgtgcgggtgtctgctcgagtgggtccccgtgagggcagtgccagtgtcctcactgtccgccgggagccggaaactccacttgctgttccagggctgcgggttgtggtgtcagatgcaacgcgagtgagggtggcctggggacccgtccctggagccagtggatttcggattagctggagcacaggcagtggtccggagtccagccagacactgcccccagactctactgccacagacatcacagggctgcagcctggaaccacctaccaggtggctgtgtcggtactgcgaggcagagaggagggccctgctgcagtcatcgtggctcgaacggacccactgggcccagtgaggacggtccatgtgactcaggccagcagctcatctgtcaccattacctggaccagggttcctggcgccacaggatacagggtttcctggcactcagcccacggcccagagaaatcccagttggtttctggggaggccacggtggctgagctggatggactggagccagatactgagtatacggtgcatgtgagggcccatgtggctggcgtggatgggccccctgcctctgtggttgtgaggactgcccctgagcctgtgggtcgtgtgtcgaggctgcagatcctcaatgcttccagcgacgttctacggatcacctgggtaggggtcactggagccacagcttacagactggcctggggccggagtgaaggcggccccatgaggcaccagatactcccaggaaacacagactctgcagagatccggggtctcgaaggtggagtcagctactcagtgcgagtgactgcacttgtcggggaccgcgagggcacacctgtctccattgttgtcactacgccgcctgaggctccgccagccctggggacgcttcacgtggtgcagcgcggggagcactcgctgaggctgcgctgggagccggtgcccagagcgcagggcttccttctgcactggcaacctgagggtggccaggaacagtcccgggtcctggggcccgagctcagcagctatcacctggacgggctggagccagcgacacagtaccgcgtgaggctgagtgtcctagggccggctggagaagggccctctgcagaggtgactgcgcgcactgagtcacctcgtgttccaagcattgaactacgtgtggtggacacctcgatcgactcggtgactttggcctggactccagtgtccagggcatccagctacatcctatcctggcggccactcagaggccctggccaggaagtgcctgggtccccgcagacacttccagggatctcaagctcccagcgggtgacagggctagagcctggcgtctcttacatcttctccctgacgcctgtcctggatggtgtgcggggtcctgaggcatctgtcacacagacgccagtgtgcccccgtggcctggcggatgtggtgttcctaccacatgccactcaagacaatgctcaccgtgcggaggctacgaggagggtcctggagcgtctggtgttggcacttgggcctcttgggccacaggcagttcaggttggcctgctgtcttacagtcatcggccttccccactgttcccactgaatggctcccatgaccttggcattatcttgcaaaggatccgtgacatgccctacatggacccaagtgggaacaacctgggcacagccgtggtcacagctcacagatacatgttggcaccagatgctcctgggcgccgccagcacgtaccaggggtgatggttctgctagtggatgaacccttgagaggtgacatattcagccccatccgtgaggcccaggcttctgggcttaatgtggtgatgttgggaatggctggagcggacccagagcagctgcgtcgcttggcgccgggtatggactctgtccagaccttcttcgccgtggatgatgggccaagcctggaccaggcagtcagtggtctggccacagccctgtgtcaggcatccttcactactcagccccggccagagccctgcccagtgtattgtccaaagggccagaagggggaacctggagagatgggcctgagaggacaagttgggcctcctggcgaccctggcctcccgggcaggaccggtgctcccggcccccaggggccccctggaagtgccactgccaagggcgagaggggcttccctggagcagatgggcgtccaggcagccctggccgcgccgggaatcctgggacccctggagcccctggcctaaagggctctccagggttgcctggccctcgtggggacccgggagagcgaggacctcgaggcccaaagggggagccgggggctcccggacaagtcatcggaggtgaaggacctgggcttcctgggcggaaaggggaccctggaccatcgggcccccctggacctcgtggaccactgggggacccaggaccccgtggccccccagggcttcctggaacagccatgaagggtgacaaaggcgatcgtggggagcggggtccccctggaccaggtgaaggtggcattgctcctggggagcctgggctgccgggtcttcccggaagccctggaccccaaggccccgttggcccccctggaaagaaaggagaaaaaggtgactctgaggatggagctccaggcctcccaggacaacctgggtctccgggtgagcagggcccacggggacctcctggagctattggccccaaaggtgaccggggctttccagggcccctgggtgaggctggagagaagggcgaacgtggacccccaggcccagcgggatcccgggggctgccaggggttgctggacgtcctggagccaagggtcctgaagggccaccaggacccactggccgccaaggagagaagggggagcctggtcgccctggggaccctgcagtggtgggacctgctgttgctggacccaaaggagaaaagggagatgtggggcccgctgggcccagaggagctaccggagtccaaggggaacggggcccacccggcttggttcttcctggagaccctggccccaagggagaccctggagaccggggtcccattggccttactggcagagcaggacccccaggtgactcagggcctcctggagagaagggagaccctgggcggcctggccccccaggacctgttggcccccgaggacgagatggtgaagttggagagaaaggtgacgagggtcctccgggtgacccgggtttgcctggaaaagcaggcgagcgtggccttcggggggcacctggagttcgggggcctgtgggtgaaaagggagaccagggagatcctggagaggatggacgaaatggcagccctggatcatctggacccaagggtgaccgtggggagccgggtcccccaggacccccgggacggctggtagacacaggacctggagccagagagaagggagagcctggggaccgcggacaagagggtcctcgagggcccaagggtgatcctggcctccctggagcccctggggaaaggggcattgaagggtttcggggacccccaggcccacagggggacccaggtgtccgaggcccagcaggagaaaagggtgaccggggtccccctgggctggatggccggagcggactggatgggaaaccaggagccgctgggccctctgggccgaatggtgctgcaggcaaagctggggacccagggagagacgggcttccaggcctccgtggagaacaaggcctccctggcccctctggtccccctggattaccgggaaagccaggcgaggatgggaaacctggcctgaatggaaaaaacggagaacctggggaccctggagaagacgggaggaagggagagaaaggagattcaggcgcctctgggagagaaggtcgtgatggccccaagggtgagcgtggagctcctggtatccttggaccccaggggcctccaggcctcccagggccagtgggccctcctggccagggttttcctggtgtcccaggaggcacgggccccaagggtgaccgtggggagactggatccaaaggggagcagggcctccctggagagcgtggcctgcgaggagagcctggaagtgtgccgaatgtggatcggttgctggaaactgctggcatcaaggcatctgccctgcgggagatcgtggagacctgggatgagagctctggtagcttcctgcctgtgcccgaacggcgtcgaggccccaagggggactcaggcgaacagggccccccaggcaaggagggccccatcggctttcctggagaacgcgggctgaagggcgaccgtggagaccctggccctcaggggccacctggtctggcccttggggagaggggcccccccgggccttccggccttgccggggagcctggaaagcctggtattcccgggctcccaggcagggctgggggtgtgggagaggcaggaaggccaggagagaggggagaacggggagagaaaggagaacgtggagaacagggcagagatggccctcctggactccctggaacccctgggccccccggaccccctggccccaaggtgtctgtggatgagccaggtcctggactctctggagaacagggaccccctggactcaagggtgctaagggggagccgggcagcaatggtgaccaaggtcccaaaggagacaggggtgtgccaggcatcaaaggagaccggggagagcctggaccgaggggtcaggacggcaacccgggtctaccaggagagcgtggtatggctgggcctgaagggaagccgggtctgcagggtccaagaggcccccctggcccagtgggtggtcatggagaccctggaccacctggtgccccgggtcttgctggccctgcaggaccccaaggaccttctggcctgaagggggagcctggagagacaggacctccaggacggggcctgactggacctactggagctgtgggacttcctggaccccccggcccttcaggccttgtgggtccacaggggtctccaggtttgcctggacaagtgggggagacagggaagccgggagccccaggtcgagatggtgccagtggaaaagatggagacagagggagccctggtgtgccagggtcaccaggtctgcctggccctgtcggacctaaaggagaacctggccccacgggggcccctggacaggctgtggtcgggctccctggagcaaagggagagaagggagcccctggaggccttgctggagacctggtgggtgagccgggagccaaaggtgaccgaggactgccagggccgcgaggcgagaagggtgaagctggccgtgcaggggagcccggagaccctggggaagatggtcagaaaggggctccaggacccaaaggtttcaagggtgacccaggagtcggggtcccgggctcccctgggcctcctggccctccaggtgtgaagggagatctgggcctccctggcctgcccggtgctcctggtgttgttgggttcccgggtcagacaggccctcgaggagagatgggtcagccaggccctagtggagagcggggtctggcaggccccccagggagagaaggaatcccaggacccctggggccacctggaccaccggggtcagtgggaccacctggggcctctggactcaaaggagacaagggagaccctggagtagggctgcctgggccccgaggcgagcgtggggagccaggcatccggggtgaagatggccgccccggccaggagggaccccgaggactcacggggccccctggcagcaggggagagcgtggggagaagggtgatgttgggagtgcaggactaaagggtgacaagggagactcagctgtgatcctggggcctccaggcccacggggtgccaagggggacatgggtgaacgagggcctcggggcttggatggtgacaaaggacctcggggagacaatggggaccctggtgacaagggcagcaagggagagcctggtgacaagggctcagccgggttgccaggactgcgtggactcctgggaccccagggtcaacctggtgcagcagggatccctggtgacccgggatccccaggaaaggatggagtgcctggtatccgaggagaaaaaggagatgttggcttcatgggtccccggggcctcaagggtgaacggggagtgaagggagcctgtggccttgatggagagaagggagacaagggagaagctggtcccccaggccgccccgggctggcaggacacaaaggagagatgggggagcctggtgtgccgggccagtcgggggcccctggcaaggagggcctgatcggtcccaagggtgaccgaggctttgacgggcagccaggccccaagggtgaccagggcgagaaaggggagcggggaaccccaggaattgggggcttcccaggccccagtggaaatgatggctctgctggtcccccagggccacctggcagtgttggtcccagaggccccgaaggacttcagggccagaagggtgagcgaggtccccccggagagagagtggtgggggctcctggggtccctggagctcctggcgagagaggggagcaggggcggccagggcctgccggtcctcgaggcgagaagggagaagctgcactgacggaggatgacatccggggctttgtgcgccaagagatgagtcagcactgtgcctgccagggccagttcatcgcatctggatcacgacccctccctagttatgctgcagacactgccggctcccagctccatgctgtgcctgtgctccgcgtctctcatgcagaggaggaagagcgggtaccccctgaggatgatgagtactctgaatactccgagtattctgtggaggagtaccaggaccctgaagctccttgggatagtgatgacccctgttccctgccactggatgagggctcctgcactgcctacaccctgcgctggtaccatcgggctgtgacaggcagcacagaggcctgtcacccttttgtctatggtggctgtggagggaatgccaaccgttttgggacccgtgaggcctgcgagcgccgctgcccaccccgggtggtccagagccaggggacaggtactgcccaggactgaggcccagataatgagctgagattcagcatcccctggaggagtcggggtctcagcagaaccccactgtccctccccttggtgctagaggcttgtgtgcacgtgagcgtgcgagtgcacgtccgttatttcagtgacttggtcccgtgggtctagccttcccccctgtggacaaacccccattgtggctcctgccaccctggcagatgactcactgtgggggggtggctgtgggcagtgagcggatgtgactggcgtctgacccgccccttgacccaagcctgtgatgacatggtgctgattctggggggcattaaagctgctgttttaaaaggcaaaaaa

SEQ ID NO: 28810 - DNA, 4714 bp, Homo Sapiens
tgggttccaaggcggctggcggcggtagcgtctctgtttccttgtgggcgctcgcgcggccctgggtagtctgtagagaatgccaaatgagggaatcccccactcaagtcaaactcaggagcaagactgtttacagagtcaacctgtcagtaataatgaagaaatggcaatcaagcaagaaagtggtggtgatggggaggtggaggagtacctgtcctttcgttctgtgggtgacgggctgtccacctctgctgtggggtgcgcatcagcagctccgaggagagggccagccctgctgcacatcgaccgacatcagatccaggcagtagagcctagcgcccaggcccttgagctgcagggtttgggtgtggacgtctatgaccaggacgtgctggaacagggagtgcttcagcaggtggacaatgccatccatgaggccagccgtgcctcccagctcgttgacgtggagaaggagtatcggtcggtcctggatgacctcacgtcatgtacgacatccctaaggcaaatcaataaaattattgaacagcttagccctcaagctgccaccagcagagacatcaacaggaaactagattctgtaaaacgacagaagtataataaggaacaacagctaaaaaagatcactgcaaaacaaaagcatctccaggccatccttggaggagcagaggtgaaaattgaactagatcacgccagtctggaggaggatgcagagccggggccatccagtcttggcagcatgctcatgcctgtccaggagactgcctgggaagagctcatccgcactggccagatgacaccttttggtacccagatccctcagaaacaggagaaaaagcccagaaaaatcatgcttaatgaagcatcaggcttcgaaaagtatttggcagatcaagcaaaactgtcttttgaaaggaagaagcaaggttgtaataaaagagcagctagaaaagctccagccccagtcacgcctccagccccagtgcaaaataaaaacaaaccaaacaagaaagccagagttctgtccaaaaaagaggagcgtttgaaaaagcacatcaagaaactccagaagagggctttgcagttccaggggaaagtgggattgccaaaggcaaggagaccttgggagtcagacatgaggccagaggcagagggagactctgagggtgaagagtctgagtatttccccacagaggaggaggaagaggaggaagatgacgaggtggagggggcagaggcggacctgtctggagatggtactgactatgagctgaagcctctgcccaagggcgggaaacggcagaagaaagtgccagtgcaggagattgatgatgactttttcccaagttctggggaagaagctgaagctgcttctgtaggagaaggaggaggaggaggtcggaaagtgggaagataccgagatgatggagatgaagattattataagcagcggttaaggagatggaataaactgagactgcaggacaaagagaaacgtctgaagctggaggacgattctgaggaaagtgatgctgaatttgacgaaggttttaaagtgccaggttttctgttcaaaaagctttttaagtaccagcagacaggtgttaggtggctgtgggaattgcactgccagcaggcaggaggaattctgggagatgaaatgggattgggcaagaccatccagataattgccttcttggcaggtctgagctacagcaagatcaggactcgtggttcaaattacaggtttgaggggttgggtccaactgtaattgtctgtccaacaacagtgatgcatcagtgggtgaaggaatttcacacgtggtggcctccgttcagagtggcaattctacatgaaaccggttcctatacccacaaaaaggagaaactaattcgagatgttgctcattgtcatggaattttgatcacatcttactcctacattcgattgatgcaggatgacattagcaggtatgactggcactatgtgatcttggacgaaggacacaaaattcgaaatccaaatgctgctgtcacccttgcttgcaaacagtttcgcacccctcatcggatcattctgtctggctcaccgatgcaaaataacctccgagagctgtggtcgctctttgacttcatcttcccgggaaagttaggcacgttgcctgtgtttatggagcagttctccgtccccatcaccatggggggatattcaaatgcttccccagtacaggtcaaaactgcttacaagtgtgcatgtgtcttacgagataccataaatccatacctactgcggagaatgaagtcagatgtcaagatgagcctttctttgccagataaaaatgaacaggtcttattttgccgtcttacagatgagcagcataaagtctaccaaaatttcgttgattccaaagaagtttacaggattctcaatggagagatgcagattttctccggacttatagccctaagaaaaatttgcaaccaccctgatctcttttctggaggtcccaagaatctcaaaggtcttcctgatgatgaactagaagaagatcagtttgggtactggaaacgttctgggaaaatgattgttgttgagtctttgttgaaaatatggcacaagcagggtcagcgagtattgctgttttctcagtcaaggcagatgctggacatacttgaagtattccttagagcccaaaagtatacctatctcaagatggatggtaccactacaatagcttcaagacagccactgattacgagatacaatgaggacacatccatatttgtgtttcttctgaccacgcgggtgggcggcttaggtgtcaacctgacgggggcaaacagagttgtcatctatgacccagactggaacccaagcacggacacgcaggcccgggagcgagcatggagaataggccagaagaagcaagtgactgtgtacaggctcctgactgcgggcaccattgaagaaaagatctaccaccgacaaatcttcaagcagtttttgacaaatagagtgctaaaagacccaaaacaaaggcggtttttcaaatccaatgatctctatgagctatttactctgactagtcctgatgcatcccagagcactgaaacaagtgcaatttttgcaggaactggatcagatgttcagacacccaaatgccatctaaaaagaaggattcaaccagcctttggagcagaccatgatgttccaaaacgcaagaagttccctgcttctaacatatctgtaaatgatgccacatcatctgaagagaaatctgaggctaaaggagctgaagtaaatgcagtaacttctaatcgaagtgatcctttgaaagatgaccctcacatgagtagtaatgtaactagcaatgataggcttggagaagagacaaatgcagtatctggaccagaagagttgtcagtgattagtggaaatggggaatgttcaaattcttcaggaacaggcaaaacttctatgccatctggtgatgaaagcattgatgaaaagttaggtctttcttacaaaagagaaagacccagccaggctcaaacagaagctttttgggagaataaacaaatggaaaataatttttataagcacaagtcaaaaacaaaacatcatagtgtggcagaagaagagaccctggagaaacatctgagaccaaagcaaaagcctaagaactctaagcattgcagagacgccaagtttgaaggaactcgaattccacacctggtgaagaaaaggcgttaccagaagcaagacagtgaaaacaagagtgaggccaaggaacagagcaatgacgattatgttttggaaaagcttttcaaaaaatcagttggcgtgcacagtgtcatgaagcacgatgccatcatggatggagccagcccagattatgtactggtggaggcagaagccaaccgagtggcccaggatgccctgaaagcactgaggctctctcgtcagcggtgtctgggagcagtgtctggtgttcccacctggactggccacagggggatttctggtgcaccagcaggaaaaaagagtagatttggtaagaaaaggaattctaacttctctgtgcagcatccttcatcaacatctccaacagagaagtgccaggatggcatcatgaaaaaggagggaaaagataatgtccctgagcattttagtggaagagcagaagatgcagactcttcatccgggcccctcgcttcctcctcactcttggctaaaatgagagctagaaaccacctgattctgccagagcgtttagaaagtgaaagcgggcacctgcaggaagcttctgccctgctgcccaccacagaacacgatgaccttctggtggagatgagaaacttcatcgctttccaggcccacactgatggccaggccagcaccagggagatactgcaggagtttgaatccaagttatctgcatcacagtcttgtgtcttccgagaactattgagaaatctgtgcactttccatagaacttctggtggtgaaggaatttggaaactcaagccagaatactgctaaacaacattgcttcctaaactttcaagtccctttttctaacgggcatttctgattattaatttattattaataatcatgtttgtcaatggaagttggctgcacttgatgtttgtttgcatgatgtctacctcagaattaaaactttaaggaagg

SEQ ID NO: 28811 - DNA, 2731 bp, Homo Sapiens
aagaggacttcctgaagccccctgagaggattttccacaagatttacatccagaggcacgacaatgtgagcatcctgtttgctgacatcgtgggtttcacgggcttggcatcccagtgcacagcccaggagctggtgaaactcctcaatgagctcttcggcaagttcgatgaattagccacggagaaccactgtcgccgcatcaagattctcggggactgctactactgcgtgtcgggcctcacccagcccaagactgaccatgcccactgctgtgtggagatgggactcgacatgattgataccatcacatctgtggctgaagccaccgaggtggatctgaacatgcgtgtgggtctgcacacgggcagggtcctctgtggtgtcctgggcttgcgcaagtggcagtacgacgtgtggtccaatgatgtgaccttggccaatgtcatggaagccgctggcctgccagggaaggttcatatcacaaagacgaccctagcgtgcttgaatggggactacgaggtagaaccgggttacggacatgagaggaacagtttcttgaaaactcataacatcgaaaccttttttattgtgccatcccatcgccgaaagatatttccaggcctgattctctcagatataaaaccggccaaaaggatgaagttcaagactgtctgctacctgctggtgcagctcatgcactgccggaaaatgttcaaggccgagatccccttctccaatgtcatgacctgcgaggacgatgacaagcggagggcattaagaacagcctcggaaaaactcagaaaccgctcatctttttctaccaacgttgtctacaccaccccgggcactcgcgtcaacaggtacatcagccgcctcttagaagcccgccagacagagctggagatggcagacctgaacttctttaccctgaagtacaaacatgtcgaacgggagcaaaagtaccaccagcttcaggacgagtatttcaccagcgccgttgtcctcaccctcatcctggctgccttatttggccttgtctaccttctaatattcccacagagtgtggtcgtcctgctcctgctagtattctgcatctgcttcctggtggcctgtgtcctgtacctgcacatcacccgggtccagtgttttccagggtgcctgacgattcagattcgcactgtcctgtgtattttcatagtggtcttaatctactcagtagcccaaggttgtgtggtgggctgcctgccttgggcctggagctccaagcccaacagttccctggtggtcctttcgtctgggggccagcgcacagccctgcccaccctgccctgcgagtctacacaccatgccctgctctgctgcctggtgggcaccctcccgctagccatatttttccgggtgtcctccttgccaaaaatgatcctgctctccgggctcaccacgtcctacatcctcgttctggagctcagcggatacaccaggactgggggtggtgccgtctccgggcgcagctacgagccgattgtggccatcctgctcttctcctgtgcgctggccctgcatgccaggcaggtggacatcaggctgaggctggactacctctgggccgcacaggcagaggaggagcgagaggacatggagaaggtgaagctggacaacaggcgcatcctcttcaacctcctgccggcccacgtcgcccagcacttcctcatgtccaaccctcggaacatggacctctactaccagtcctactcccaggtgggcgtcatgtttgcctccatccccaacttcaatgacttctacatcgagctggacggcaacaacatgggggtggagtgtctgcggcttctcaacgagatcatcgccgactttgacgagctcatggaaaaagacttttacaaggacatagagaagatcaagaccatcgggagcacctacatggccgctgtggggctagcgcccacctcggggaccaaggctaagaagtccatctcctcccacctgagcacgctggcggactttgccattgagatgtttgacgttctggatgaaatcaactaccagtcttacaacgactttgtcctccgagttggcatcaatgttggccctgtggtggctggagtgattggcgctcgcaggccccagtacgacatctggggaaacacagtcaacgtggccagtcggatggatagcacaggggtccagggcagaatccaggtgactgaggaagtccaccggctgctgagaaggtgcccctaccactttgtgtgccgaggcaaagtcagtgtcaagggcaaaggcgagatgttgacatactttctagaaggcaggactgatggaaacggctcccaaatcaggtccctgggcttggatcggaaaatgtgtccatttgggagagctggccttcagggcagacgtccccccgtgtgccccatgcctggcgtctcagtcagggctgggctccctccacactccccaggccagtacctgccctctgcagcagctgggaaggaggcttagtggagcccacgtgggcctctggggtgcacatggggtgggaatgctccgggggtgacacaggccacggtggctccagccaggaccagccagaccagcagagcagggagccacttgccagggtggaggaggagcattgtccaggcatggcctgtggcccgagggccaaccaccgagcaggtcacagcacagcagtgactcggtgaggggag

SEQ ID NO: 28812 - DNA, 9416 bp, Homo Sapiens
aagcgcgccgcctccccgccctctctcactccccgctcctctccgccgcgcactctcgcggcgctgggagagggcggagggggaggcggcgcgcggcgccagaggaggggggacgcagggggcggagcggagacagtaccttcggagataatcctttctcctgccgcagtggagaggagcggccggagcgagacacttcgccgaggcacagcagccggcaggatggcgaccgtggtggtggaagccaccgagccggagccgtccggcagcatcgccaacccggcggcgtccacctcgcctagcctgtcgcaccgcttccttgacagcaagttctacttgctggtggtcgtcggcgagatcgtgaccgaggagcacctgcggcgtgccatcggcaacatcgagctcggaatccgatcatgggacacaaacctgattgaatgcaacttggaccaagaactcaaactttttgtatctcgacactctgcaagattctctcctgaagtcccaggacaaaagatccttcatcaccgaagtgacgttttagaaacagtggtcctgatcaacccttctgatgaagcagtcagcaccgaggtgcgcttaatgatcactgatgctgcccgacacaagctgctcgtgctgaccgggcagtgctttgaaaataccggagagctcattctccagtccggctctttctccttccagaacttcatagagattttcaccgatcaagagatcggggagttactaagcaccacccatcctgccaacaaagccagcttaaccctgttctgtcctgaagaaggggactggaagaactccaatcttgacagacacaatctccaagacttcatcaatattaaactcaattcagcttctatcttgccagaaatggaaggactttctgagtttaccgagtatctctcagaatcagtggaagtcccatctccctttgacatcttggaacctcccacatcgggtggatttctgaagctctccaagccctgctgttatatttttccaggagggaggggcgattctgccttgtttgcagtgaatggtttcaatatgctcatcaatggcggatcagagagaaaatcctgcttctggaagctcatccgacacttagaccgagtggactccatcctgctcacccacattggggatgacaatttgcctggaataaacagcatgttacagcggaaaattgcagagctcgaggaagaacagtcccagggctccaccacaaatagtgactggatgaaaaacctcatctcccctgacttaggagttgtatttctcaatgtacctgaaaatctcaaaaatccagagccaaacatcaagatgaagagaagcatagaagaagcctgcttcactctccagtacctaaacaaattgtccatgaaaccagaacctctgtttagaagtgtaggcaatactattgatcctgtcattcttttccaaaaaatgggagtaggtaaacttgagatgtatgtgcttaatccagtcaagagcagcaaggaaatgcagtattttatgcagcagtggactggtaccaacaaagacaaggctgaattcattctgcctaatggtcaagaagtagatctcccgatttcctacttaacttcagtctcatctttgattgtgtggcatccagcaaaccctgcggagaaaatcatccgagtcctgtttcctgggaacagcacccagtacaacatcctggaagggttggaaaagctcaaacatctagactttctgaagcagccactggccacccaaaaggatctcactggccaggtgcccactcctgtggtgaaacaaacaaaactgaaacagagggctgatagccgagaaagtctgaagccagccgcaaaaccacttcctagcaaatccgtgcgcaaggagtcaaaagaagaaacccctgaggtcacaaaagtgaatcacgtggaaaagccacccaaagttgaaagcaaagaaaaggtaatggtgaaaaaagacaagccagtaaaaacagagaccaaaccttcagtgactgaaaaggaggttcccagcaaagaagagccatctccagtgaaagccgaggtggctgagaagcaagccacagatgtcaaacccaaagctgccaaggagaagacggtgaaaaaggaaacaaaggtaaagcctgaagacaagaaagaggagaaagaaaagccaaagaaagaagtggctaaaaaggaggacaaaacacctatcaagaaggaggaaaaaccaaaaaaggaagaggtgaaaaaagaagtcaaaaaagagatcaagaaagaagagaaaaaagaacccaagaaagaggttaagaaagaaacaccgccaaaggaagtcaagaaggaagttaagaaggaagagaagaaggaagtgaaaaaggaagaaaaggaacccaaaaaagaaattaagaagctccctaaagacgcaaagaaatcatctactcctctgtctgaagcaaaaaaaccagctgctttaaaaccaaaagtacccaagaaggaagagtctgtcaagaaagattctgttgctgccggaaagccaaaggagaaggggaaaataaaagtcattaagaaggaaggcaaggccgcagaggctgtcgctgcagctgtcggcactggagccaccacagcagctgtcatggcggcagctggaatagcagccattggccctgccaaagaactcgaagctgagaggtcccttatgtcatctcctgaggatctaaccaaggactttgaagagttaaaggctgaagaggtcgatgtaacaaaggacatcaagcctcagctggagctaatcgaagacgaagagaaactgaaggaaactgagccagtcgaagcctacgtcatccagaaggagagagaagtcaccaaaggtcctgccgagtcccctgatgagggaatcactaccactgaaggggagggcgaatgtgaacagacacctgaggagctggagcccgtcgagaagcagggagtagacgacattgaaaaatttgaagatgaaggagccggttttgaagaatcttcagagactggagactatgaagagaaggcagaaactgaggaggctgaggagccagaagaggatggggaggaacacgtatgtgtgagcgcctccaagcacagccccactgaggatgaggaaagtgccaaggcggaggctgatgcatacatcagggagaagagggagtctgtggccagtggggatgaccgagccgaagaagacatggatgaggccattgagaaaggagaggctgaacaatctgaagaggaggctgatgaggaggacaaagctgaagatgccagagaggaggaatatgagccggaaaaaatggaagctgaagactatgtgatggctgtggtcgacaaggctgcagaggctggtggtgccgaggagcagtatggattcctcaccacaccaaccaagcaactaggagcccagtctcctggccgagaacctgcatcttcaattcatgatgagactttacctggaggctcagagagcgaggccaccgcttctgatgaggagaatcgagaagaccagcctgaggaattcactgccacctctggctacactcagtctactattgagatatccagtgagcccacccccatggatgagatgtctacccctcgagacgtgatgagtgatgagaccaacaatgaagagacggagtccccttctcaggaattcgtaaatatcaccaaatatgaatcttcattgtattctcaggaatactctaaacctgctgatgttacaccgctcaacggattttctgaaggatcaaaaacagatgccactgatggcaaggattacaatgcttcagcctctaccatatcaccaccctcttccatggaggaagacaaattcagcagatctgctttacgtgatgcttactgctctgaagtgaaagccagcaccactttggacatcaaagatagcatctcagctgtttcaagtgaaaaggtcagcccatcgaagagcccgtccctgagtccatctccaccatcacccttagaaaagacccccctgggtgaacgtagtgtgaacttctctctgacgcccaatgagattaaagtctctgcagaggcagaagtagccccggtgtctcctgaggtgacccaagaagtagttgaagaacattgtgctagtcctgaggacaagactctggaagtggtgtcaccatctcagtccgtgactggcagtgctggtcacacaccttactatcaatctcctactgacgagaaatccagtcatctccctacagaagtcattgaaaaaccaccagcagttccagtgagttttgaattcagtgatgccaaagatgagaatgaaagggcttcagtaagccccatggatgagcccgtgcctgactcagagtctcctattgaaaaagttttgtctcctttacgcagcccgcccctcattggatccgagtctgcttatgaaagttttctaagtgctgatgacaaggcttctggcagaggtgccgaaagtccttttgaagaaaagagtggaaaacaaggctctccagaccaagtaagtccagtttctgaaatgacttctactagtctttaccaagacaaacaggaagggaaaagcacagactttgcaccaataaaagaagactttggccaagaaaagaaaactgatgatgttgaagccatgagttctcaaccagcactggctctggatgaaaggaaattaggagatgtttctcccacacaaatagatgtcagtcagtttggatcttttaaagaagacactaagatgtccatttctgaaggtactgtctcagacaagtcagctactcctgttgatgagggcgtagcagaagacacgtactctcatatggagggtgtggcctcagtgtccacagcctcagtggctacgagctcatttccagagccaacaacagatgatgtgtctccatctctgcatgctgaggttggctccccacattccacagaagtagatgactccctttcagtgtctgttgtgcaaacacctaccacattccaggaaacagaaatgtctccatctaaagaagaatgcccaagaccgatgtcaatttctccaccagatttctcccctaaaactgcaaagtccaggacacccgttcaagatcacagatctgaacagtcctcaatgtctattgaatttggccaagaatctcctgagcaatcccttgctatggacttcagtcgacagtctccagatcaccctacagtgggtgcaggcgtgcttcacatcactgaaaatgggccaactgaagtggactacagtccttctgacatgcaggactccagtttatcacataagataccacctatggaggagccgtcctacacccaagataatgatctttctgagctcatctcagtatctcaggtagaggcctccccgtccacctcttctgctcataccccttctcagatcgcttctcctctccaagaagatactctatccgatgttgctcctcccagagatatgtccttatatgcctcactcacctctgaaaaagtgcaaagtctggaaggagagaagctctctccaaaatctgatatctctccactcaccccacgagagtcctctcctttatattcacctactttttcagattctacctctgcagtcaaagagaaaacagcaacttgccacagttcctcttctccaccaatagatgcagcatccgcagagccctatggcttccgtgcctcagtgttattcgatacaatgcaacaccatctagccttgaatagagatttgtccacacctggcctggagaaggacagtggagggaagacacctggtgactttagctatgcctatcaaaagcctgaggaaacaaccaggtccccagatgaagaagattatgactatgagtcttatgagaagaccacccggacctcagatgtgggtggctattactatgagaagatagagagaaccacaaaatctccaagtgacagtggctactcctatgagaccattgggaaaactaccaagacccctgaagatggtgactattcctatgaaattattgagaagaccacacggacccctgaagagggcgggtactcatatgacataagtgaaaagaccaccagcccccccgaagtgagtggttacagctatgaaaagactgagaggtctagaaggcttctggatgacatcagcaatggctatgatgactctgaggatggtggccacacacttggggaccccagctactcttatgaaaccactgagaaaattaccagtttccctgagtctgaaggttattcctatgagacatctacaaagacaacacgaacccctgatacttccacatactgttacgagactgcagagaaaatcactagaacccctcaggcatccacatattcctacgagacttcagacctatgctacactgcagaaaagaagtccccctcagaagcccgtcaggatgtcgatttatgcctcgtgtcctcttgtgaatacaagcaccccaagacagagctttcaccctctttcattaatcccaatcctcttgagtggtttgccagtgaagaacccactgaagaatctgaaaagcccctcactcaatcagggggagccccaccgcctccaggaggaaagcaacagggccgacagtgtgatgaaacccctcccacctcagtcagcgagtcagccccatcccagaccgactctgatgttcccccggagactgaagagtgcccctccatcacggccgatgccaatatcgactctgaagacgagtcggaaaccatccccacagacaaaactgtcacgtacaaacacatggacccacctccagctcccgtgcaagaccgcagcccttcgccacgccaccctgatgtgtccatggtggacccagaggccttggccattgagcagaacctgggcaaagctctaaagaaagatctgaaagagaagaccaaaaccaaaaagccaggtacaaagaccaagtcatcttcacctgtcaaaaagagtgatgggaagtctaagcccttggcagcttcaccaaaaccagcgggcttgaaagaatcctcggataaagtgtccagggtggcttctcctaagaagaaagaatctgtggaaaaggcagcaaaacccaccaccactcctgaggtcaaagctgcacgtggggaagagaaagacaaggagaccaagaatgctgccaatgcctctgcatccaagtcggccaagaccgccactgcaggaccaggaactaccaagacgaccaagtcatctgctgtgcccccaggcctccctgtgtatttggacctgtgctacattcctaaccacagcaatagtaagaatgttgatgtggaatttttcaagagagtgcggtcttcctactacgtggtgagtgggaatgaccctgctgctgaggagcccagccgggctgtcctggacgctttgttggaaggaaaggctcagtggggcagcaacatgcaggtgacactgatcccaactcatgactcagaagtgatgagggaatggtaccaggagacccatgagaaacagcaagatctcaacatcatggttttagcaagcagcagcacagtggttatgcaagatgaatccttccctgcatgcaagattgaactgtaaaaaccaaggccagccacaccacaggatctgaactttgtttccagaaattcttcaatttgaaatcaccttttctaaaaagtcaattcatctagttaagtcgctgaacaattacctgccaaatgctatactgtgtcatggtgatgcaagtcactaaatttctcagtttttgctgattgctaagggaaataacagtatttccacaatagggttcaaattcctgcaaaattacctaccccagttcatctctgctgaacatttggaaaccatgcactagccaacccaactgacttctgctaggtagaggcatttgtcttagagagagagagagcgcgggagagagtgagagagagtgagagcacaaagataacgcaggagagagagagagaaagaatgagaaagaaaaggaatgcaagagaaggagatgtaatgacagagagttctggtgagatacccagagagaaaaagagagagcagggtggggtaaggaggagaaaataaaccaacaattaggtctgcattttctcaggcagtaggcattctttagtctacataggcaaagttttccatttttgtcagtctgagtcatcaaaaagagtcttaattttctaaaacaagttggctagaagaaagtaaaaagaacaacacttgttatgagggcatgtgatattttcacatcttaattaagctccttcagtttgaaggctgcacactgacataatgtagtgagtgtagactggccatgcaagtggtttgggccccattcagaactctcagactctaaacacacaagtagattgatctaaggcatgctcccagcatttgtccacccacttagtccactctgagtcgattaacctgcatgcagcaacacccaagtccaccccaattaactgaagcaaataccaaagcagttgggagtacatatggtagacaatttgccttaggaagtgacttgaatgtacaaagatacttgatgcacttattttttaatgtgagacagcaagtttataaaacatccatataggattatagatacttaaaggaacacgtgggtgagcgtgtgtgggggtactagaagctgatctgattggtccaacagtttgatgctgagtcatgcgtgttgaatcccacttcagtgcacctgtggcctctcagtcaaacaagttgtgcctttcacagcttctttactactgcaagttcaagactgaaatggcttctatgatcagaactgggaaaacagtgaatcttatggtggaagaggttctcagcaagtgtacagtatttaccttcctttgtcttacattggctttttaaattttccattaatttcaacataattatgggaacaagtgtacagaagaattttttttttaagatatgtgagaacttttcatagatgaactttttaacaaatgttttcatttacaggaaattgcaaagaaaattctcaagtgatagtctttttttttaagtgtttcgtaagacaaaaattgaataatgttttttgaagttctggcaagattgaagtctgatattgcagtaatgatatttattaaaaacccataactaccaggaataatgatacctcccaccccttgattcccataacataaaagtgctacttgagagtgggggagaatggcatggtaggctacttttcagggccttgacaagtacatcacccagtggtatcctacatacttctttcaagatcttcaaccatgaggtaaaagagccaagttcaaagaaccctagcacaaatttgctttgggattttcttttctgga

SEQ ID NO: 28813 - DNA, 1002 bp, Homo Sapiens
cgccagagaggctccctcagccctgctccgcggggtccacagcgggctccacagcgggctccatagcgggctccacagcggtccggcggcggcagcgagcccgtgggcagtgggggttggtcccgtggctccggcccccggtgcagaatggcggcggcggttcggatgaacatccagatgctgctggaggcggccgactatctggagcggcgggagagagaagctgaacatggttatgcctccatgttaccatacaataacaaggacagagatgccttaaaacggaggaacaaatccaaaaagaataacagcagtagcagatcaactcacaatgaaatggagaagaatagacgggctcatcttcgcttgtgcctggagaagttgaaggggctggtgccactgggacccgaatcaagtcgacacactacgttgagtttattaacaaaagccaaattgcacataaagaaacttgaagattgtgacagaaaagccgttcaccaaatcgaccagcttcagcgagagcagcgacacctgaagaggcagctggagaagctgggcattgagaggatccggatggacagcatcggctccaccgtctcctcggagcgctccgactccgacagggaagaaatcgacgttgacgtggagagcacggactatctcacaggtgatctggactggagcagcagcagtgtgagcgactctgacgagcggggcagcatgcagagcctcggcagtgatgagggctattccagcaccagcatcaagagaataaagctgcaggacagtcacaaggcgtgtcttggtctctaagagagtgggcactgcggctgtctccttgaaggttctccctgttggttctgattaggtaacgtattggacctgcccacaactcccttgcacgtaaacttcagtgtcccaccttgaccaaaatcagctttgtaactgttttcaaggaggtgcttaggattgtgggtttctgattgcatcactagcttctcc

SEQ ID NO: 28814 - DNA, 3779 bp, Homo Sapiens
gggaaacatggccgagtatacgcggctgcacaacgccttggcgctaatccgcctccgaaacccgccggtcaacgcgatcagtacgactttactccgtgatataaaagaaggactacagaaagctggaagagaccatacaataaaagccattgtgatttgtggagcagagggcaaattttctgcaggtgctgatattcgtggcttcagtgctcctaggacatttggccttatactgggacatgtagtagatgaaatacagagaaatgagaagcccgtggtggcagcaatccaaggcatggctttcggagggggactagagctggccctgggctgtcactataggattgcccacgcagacgctcaagttggcttaccagaagttacacttggacttctccctggtgcaagaggaacccagcttctccccagactcactggagttcctgctgcacttgacttaattacctcaggaagacgtattttagcagatgaagcactcaagctgggcattctagataaagttgtaaactcagacccggttgaagaagcaatcagatttgctcagagagtttcagatcaacctctagaatcccgtagactctgcaacaagccaattcagagcttgcccaacatggacagcatttttagtgaggccctcttgaagatgcggaggcagcaccctgggtgtcttgcacaggaggcttgtgtccgtgcagtccaggctgctgtgcagtatccctatgaagtgggcatcaagaaggaggaggagctgtttctatatcttttgcaatcagggcaggctagagccctgcaatatgctttcttcgctgaaaggaaagcaaataagtggtcaactccctccggagcatcgtggaaaacagcatcagcgcggcctgtctcctcagttggtgttgttggcttgggaacaatgggccgaggcattgtcatttcttttgcaagggccaggattcctgtgattggtgtagactcggacaaaaaccagctagcaactgcaaacaagatgataacctctgtcttggaaaaagaagcctccaaaatgcaacagagcggccacccttggtcaggaccaaaacccaggttaacttcatctgtgaaggagcttggtggtgtagatttagtcattgaagcagtatttgaggaaatgagcctgaagaagcaggtctttgctgaactctcagctgtgtgcaaaccagaagcatttttgtgcactaatacttcagccctggatgttgatgagattgcttcttccactgatcgtcctcacttggtcattggcacccacttcttttcgccagctcatgtcatgaagttgttagaggttattcccagccaatactcttcccccactaccattgccactgttatgaacttatcaaaaaagattaaaaagattggagtcgttgtaggcaactgttttggatttgtggggaatcgaatgttgaatccttactacaatcaggcatatttcttgttagaagaaggcagcaaaccagaggaggtagatcaggtgctggaagagtttggttttaaaatgggaccttttagagtgtctgatcttgctgggttggatgtgggctggaaatctagaaaggggcaaggtcttactggacctacattgcttccaggaactcctgcccgaaaaaggggtaataggaggtactgcccaattcctgatgtgctctgtgaattaggacgatttggccagaagacaggtaagggttggtatcaatatgacaagccattgggtaggattcacaaacctgatccctggctttccacattcctatcacggtatagaaaaccccatcacattgaaccacgtaccattagccaggatgagatccttgaacgctgcttatattcacttatcaatgaagcattccgtatcttgggagaagggatagctgctagcccagagcacattgatgttgtctatttacatggatatggatgcgcaaggcacaagggcgggcccatgttctatgcttccacagttgggttgcccacagttctagagaaattgcagaaatattacaggcagaaccctgatattccccaactggagccaagtgactatctaaaaaaactggcttctcagggaaaccctcccctgaaagaatggcaaagcttggcaggctcccctagcagtaaattgtgattcagtcttccagattatgcctcacatgctagcatcaggtaatgctgactgaatttcagtgaaattaaatcaaaaatccaaagtaagattgttctgaaatacaaagcaaaataaataatcattagaatcttctgtgtaacgactctaatggtcaaatctttaggaatgtgcttcctatgcctctgaatctgtccttatcagataaattcaatgcatgaacttgtgtgaatataataccataatagctaatgaaagaggctcaggcataagttgagattctcaaatgcttttatcattggataaatgtgtcatcaattaataaatgataaatgcagctaagtcatacattcattttgactcctttcaatgtcacacacatagtattgatcagaaatcttatgaatcatacatacactcaacaaacattaaagttgtaggaaaaagacagttggaaattggtaagggaactgagtacttcaaaccagcacagggaacttaggttagtgtggcaagcctttcctcttctggtctttcctcttctgtttatggagaaataatagaaagtagtaagtcgttaacttagtgtaagaagggtcttagagaacatctaaccttctaggatttcccaattctgtgatagagtaatgacaccagttttcctgtcatgacaagcctctgtgatgttacatatggaaatggttgaatcttgaaaaatctaaaattgttgcaaaacatattttgtatgattttgttgtaagagttcttctctttttactttttgccttgtgtagttaaaaattaaggggctggtcaatacaaaaacttgtacacaaatatttatagcagaattattcataatggccaaaagctgaatacaacccaaatgtctatgaactaatgaatagataaaccaaatctggtatatccatacaatggactatattattcagccataaaaagaaataaagggccaggcacagtggctcacacctgtaatcccagcactttgggaggctgaggcaggaggattgtttgaggccagaaatttgagaccagcctgggcaacatagcaaaaccctgtctctacaaaaaatactttccgtacattagtggttacctaaggctagaattgggggtgatgaatggggagtacaggattcatctaatgggtacaggatttctttatggttcatgaaaatggtctaaacttattgtggtaatggtcacataacaatatattagaaaaccattgagttgtatattttaagtgggtgaattatatggtatgtgaattatatctcaataaaggtgttagtaaataaatgggctgaagatgttatccttcattgtggtgtaaatgaactttcacaatattttcacctgtgaacccaaataaaatgattaaagttctgatggaaaaatcttgaatggagtataagttttccgttgttaaaaagcaaacaaaaaaccaacaaaaaatccaagtgtgccttgaattgtacagagcacaattattatgtttgaaatgtgtactacttaattttatataatttggtttgtgaaattaaagacatcaataaaaatgattcctgaaagtagt

SEQ ID NO: 28815 - DNA, 1177 bp, Homo Sapiens
tctttccgctaccactctctcttctacttcactacatcttcttcttcaacatgggtgccaagatcaagatcggaatcaacggattcggaagaatcggacgtttagttgctagagtagctttgaagagagatgatgttgaactcgttgcagttaacgatcctttcatcaccactgattacatgacgtatatgtttaagtacgacagtgttcacggacagtggaagaacgacgaactcaccgtcaaggactctaacactcttctcttcggtcagaagccagttactgtctttgcacacaggaacccagaagagatcccatgggccagcactggtgctgatatcattgttgagtctactggtgtttttactgataaggacaaggctgctgctcatttgaagggtggtgccaagaaggtcatcatttctgctcccagtaaagatgctcccatgtttgttgttggtgttaatgagaatgaatacaagccagagtttgacattatttccaatgctagctgcaccaccaactgccttgcaccacttgcaaaggttattaatgacaggtttggcattgttgagggtctcatgaccactgtccattccatcaccgccacccagaagactgttgatggaccatcaagcaaggactggagaggtggaagagctgcttcatttaacatcattcccagcagtaccggagctgctaaggctgtcggcaaagtgcttcctgctttgaatggaaagttgaccggtatgtcattccgtgtcccaactgtggatgtctccgttgttgaccttacagtgaggcttgagaaggccgccacctatgatgaaatcaaagctgctatcaaggaagagtctgagggcaagttgaaaggaatccttggttacactgaagacgatgtggtctccactgactttattggtgacaccaggtcaagtatctttgatgccaaggcaggaattgccttaaatgacaagtttgttaagcttgtctcatggtatgacaacgagttgggttacagtacccgtgtggttgacctcattgttcacattgctaaacaactttaagttggcactggcggttggtagtgctagacattggcctacttttgtttctttatcatccatttgcctagcggcagttaggcctcttatcatgtaataagttgattttctgt

SEQ ID NO: 28816 - DNA, 1662 bp, Homo Sapiens
caagagctccagcaaagactttcactgtagcttgacttgacctgagattaactagggaatcttgagaataaagatgagctctgaaaattgtttcgtagcagagaacagctctttgcatccggagagtggacaagaaaatgatgccaccagtccccatttctcaacacgtcatgaagggtccttccaagttcctgtcctgtgtgctgtaatgaatgtggtcttcatcaccattttaatcatagctctcattgccttatcagtgggccaatacaattgtccaggccaatacacattctcaatgccatcagacagccatgtttcttcatgctctgaggactgggttggctaccagaggaaatgctactttatttctactgtgaagaggagctggacttcagcccaaaatgcttgttctgaacatggtgctactcttgctgtcattgattctgaaaaggacatgaactttctaaaacgatacgcaggtagagaggaacactgggttggactgaaaaaggaacctggtcacccatggaagtggtcaaatggcaaagaatttaacaactggttcaacgttacagggtctgacaagtgtgtttttctgaaaaacacagaggtcagcagcatggaatgtgagaagaatttatactggatatgtaacaaaccttacaaataataaggaaacgtgttcacttattgactattatagaatggaactcaaggaaatctgtgtcagtggatgctgctctgtggtccgaagtcttccatagagactttgtgaaaaaaaattttatagtgtcttgggaattttcttccaaacagaactatggaaaaaaaggaagaaattccaggaaaatctgcacttgtggcttttattgccatgagctagaagcatcacaggttgaccaataaccatgcccaagaatgagaagaatgactatgcaacctttggatgcactttatattattttgaatccagaaataatgaaataactaggcgtggacttactattaattgctgaatgactaccaacagtgagagcccttcatgcatttgcactattggaaggagttagatgttggtactagatactgaatgtaaacaaaggaattatggctggtaacatagtttttagtctaattgaatcccttaaactcagggagcatttataaatggcaaatgcttatgaaactaagatttgtaatatttctctctttttagagaaatttgccaatttactttgttatttttccccaaaaagaatgggatgatcgtgtatttatttttttacttcctcagctgtagacaggtccttttcgatggtacatatttctttgcctttataatcttttatacagtgtcttacagagaaaagacataagcaaagactatgaggaatatttgcaagacatagaatagtgttggaaaatgtgcaatatgtgatgtggcaaatctctattaggaaatattctgtaatcttcagacctagaataatactagtcttataataggtttgtgactttcctaaatcaattctattacgtgcaatacttcaatacttcatttaaaatatttttatgtgcaataaaatgtatttgtttgtattttgtgttcagtacaattataagctgtttttatatatgtgaaataaaagtagaataaac

SEQ ID NO: 28817 - DNA, 3061 bp, Homo Sapiens
cgcggcgcagggccgccggagagcgcgggtgacctggcggcggcagatgccgctcgcccagctcaaggagccctggccgctcatggagctagtgccgctggacccggagaatggacagacctcaggggaagaagctggacttcagccgtccaaggatgagggcgtcctcaaggagatctccatcacgcaccacgtcaaggctggctctgagaaggctgatccatcccatttcgagctcctcaaggttctgggccagggatcctttggcaaagtcttcctggtgcggaaagtcacccggcctgacagtgggcacctgtatgctatgaaggtgctgaagaaggcaacgctgaaagtacgtgaccgcgtccggaccaagatggagagagacatcctggctgatgtaaatcacccattcgtggtgaagctgcactatgccttccagaccgagggcaagctctatctcattctggacttcctgcgtggtggggacctcttcacccggctctcaaaagaggtgatgttcacggaggaggatgtgaagttttacctggccgagctggctctgggcctggatcacctgcacagcctgggtatcatttacagagacctcaagcctgagaacatccttctggatgaggagggccacatcaaactcactgactttggcctgagcaaagaggccattgaccacgagaagaaggcctattctttctgcgggacagtggagtacatggcccctgaggtcgtcaaccgccagggccactcccatagtgcggactggtggtcctatggggtgttgatgtttgagatgctgacgggctccctgcccttccaggggaaggaccggaaggagaccatgacactgattctgaaggcgaagctaggcatgccccagtttctgagcactgaagcccagagcctcttgcgggccctgttcaagcggaatcctgccaaccggctcggctccggccctgatggggcagaggaaatcaagcggcatgtcttctactccaccattgactggaataagctataccgtcgtgagatcacgccacccttcaagccagcagtggctcagcctgatgacaccttctactttgacaccgagttcacgtcccgcacacccaaggattccccaggcatcccccccagcgctggggcccatcagctgttccggggcttcagcttcgtggccaccggcttgatggaagacgacggcaagcctcgtgccccgcaggcacccctgcactcggtggtacagcaactccatgggaagaacctggtttttagtgacggctacgtggtaaaggagacaattggtgtgggctcctactctgagtgcaagcgctgtgtccacaaggccaccaacatggagtatgctgtcaaggtcattgataagagcaagcgggatccttcagaagagattgagattcttctgcggtatggccagcaccccaacatcatcactctgaaagatgtgtatgatgatggcaaacacgtgtacctggtgacagagctgatgcggggtggggagctgctggacaagatcctgcggcagaagttcttctcagagcgggaggccagctttgtcctgcacaccattggcaaaactgtggagtatctgcactcacagggggttgtgcacagggacctgaagcccagcaacatcctgtatgtggacgagtccgggaatcccgagtgcctgcgcatctgtgactttggttttgccaaacagctgcgggctgagaatgggctcctcatgacaccttgctacacagccaactttgtggcgcctgaggtgctgaagcgccagggctacgatgaaggctgcgacatctggagcctgggcattctgctgtacaccatgctggcaggatatactccatttgccaacggtcccagtgacacaccagaggaaatcctaacccggatcggcagtgggaagtttaccctcagtgggggaaattggaacacagtttcagagacagccaaggacctggtgtccaagatgctacacgtggatccccaccagcgcctcacagctaagcaggttctgcagcatccatgggtcacccagaaagacaagcttccccaaagccagctgtcccaccaggacctacagcttgtgaagggagccatggctgccacgtactccgcactcaacagctccaagcccaccccccagctgaagcccatcgagtcatccatcctggcccagcggcgagtgaggaagttgccatccaccaccctgtgaggcaccagggcattcgggccacagggcggtgctagcttgacacagtcagatgcttccagagggagcaggccggaaccacagggccagagggagctggaaccgaggggccggggaagctgccagcccagaacacccctaatgagggtgtgagaagtgccttctccttccccaggatggactcttctcggctcaggctctgctggtggaaagcgattcactgtataaactttttttatgaaaaaaatggcatcaaccaccatggatttttacaagatccatttgcctttctgggagcagaaacagccattgcggcccaggaggggaactgagtcacgctggggctctctgagactctttagagcagctttgggatcccaccctgggacccccacgattggccacctgtagccatctgcacacacctccgagacagtccagtgtcacctctctcagagcatctggctgtttagcagaactcattctatccccaatcagctccttttccgttctgttctgctgggagttctagaaccacttcctgctacaggaggggtctcatgtcctgctggcttccagcttcaggcaccagcatccaccttgctctgccagtggatccctgcggtcaggctgggcagccccagagagaggatgtggaaagcactttttggctgacttcatctggggttggcaacaggacagagttcacaggaggccagtgggcgggccatgagggacagggtcttttttcatttcttcctcagctggttactcagggttcatctgtccatggcctttctaatggaattc

SEQ ID NO: 28818 - DNA, 1336 bp, Homo Sapiens
gggagatggcgccggtgttgcccctggtgctgcccctgcagccccgcatccgcctggcacaagggctctggctcctctcctggctgctggcgctggctggtggcgtcatcctcctctgtagtgggcacctcctggtccagctaaggcaccttggcaccttcctggctccctcctgtcagttccctgtcctgccccaggctgccctggcagcgggcgcggtggctctgggcacaggactagtgggtgtaggagccagccgggcaagtctgaatgcagctctataccctccctggcgaggggtcctgggcccgctgctggtggctggcacggctggtgggggggggctcctggtcgtcgccctcgggctagccctggctttgcctgggagtctggatgaggcgctggaggagggcctggtgactgccttggctcactacaaggacacagaggtgcctgggcactgtcaggccaaaaggctggtggatgagctgcaactgaggtaccactgctgcgggcgccacgggtacaaggattggtttggggtccagtgggtcagcagccgttacctggatcccggtgaccgggatgtggctgaccggatccagagcaatgtagaaggcctatacctgactgatggggtccctttctcctgttgcaacccccactcaccccggccttgcctgcaaaaccgtctttcagactcctacgcccaccccctgttcgatccccgacaacccaaccaaaacctctgggcccaagggtgccatgaggtgctgctggagcacttgcaggacttggcaggcacactgggtagcatgctggctgtcaccttcctactgcaggctctggtgctccttggcctgcggtacctgcaaacagcactggaggggcttggaggggtcattgatgcgggaggagagacccagggctatctctttcccagtgggctgaaagatatgctgaaaacagcatggctacagggaggggttgcctgcaggccagcacctgaggaggccccaccaggagaagcacctcccaaggaggatctatctgaggcctagaggcctggagcttggggtgaggaagagggagggatggacaagtctgaaaacctcacaactccttaccaaggctccaggttggggggatcgtaggattagaggggctaaggatagtcagcgagctggactggggtaagaaagaaaaccagatgtcctagggcctagcccttgtagtcagaaccaccagggaacagcaaagaacagagtgatgggaaagtgacatgagaaggcctggaggctgattctgatatagactcaataaagtttttggatgg

SEQ ID NO: 28819 - DNA, 13747 bp, Homo Sapiens
ggatccgccaaggactttgattattgcgtgaaagtgctgactgccaggacaggaagctagctaagatgcaagttcccagcctagagcagtggcctctggggggtctagggcggacccaagggcaaggccagggtggcagcagcttggggactctggctggctccctcccctgacactggctgaagcccaggtggtctctaacccctcccatctctccctctcatcttccccagggcatctcctcccaaccaggcaactccccgagtggcacagtggtgtgaagccatggatatcgggcccccccaaccccatgcccccagcctcctagccataaccctccctgctgacctcacagatcaacgtattaacaagactaaccatgatggatggactgctccagtccccccacctgcacaaaatttgggggccccccagactggcccggacacgggcgatgtaatagcccttgtggcctcagccttgtcccccacccactgccaagtacaatgacctcttcctctgaaacatcagtgttaccctcatccctgtccccagcatgtgactggtcactcctggggagacactccccgcccctgccacaagagccccaggtctgcagtgtgcccctcagttgagtgggcagggccgggggtggtccagccctcgcccggcccccaccccagctgcccttgctattgtctgtgcttttgaagagtgttaaattatggaagcccctcaggttcctccctgtcccgcaggacctcttatttatactaaagttccctgttttctcagcgggtctgtccccttcggaggagatgatgtagaggacctgtgtgtgtactctgtggttctaggcagtccgctttccccagaggaggagtgcaggcctgctcccagcccagcgcctcccaccccttttcatagcaggaaaagccggagcccagggagggaacggacctgcgagtcacacaactggtgacccacaccagcggctggagcaggaccctcttggggagaagagcatcctgcccgcagccagggcccctcatcaaagtcctcggtgttttttaaattatcagaactgcccaggaccacgtttcccaggccctgcccagctgggactcctcggtccttgcctcctagtttctcaggcctggccctctcaaggcccaggcaccccaggccggttggaggccccgacttccactctggagaaccgtccaccctggaaagaagagctcagattcctcttggctctcggagccgcagggagtgtgtcttcccgcgccaccctccaccccccgaaatgtttctgtttctaatcccagcctgggcaggaatgtggctccccggccaggggccaaggagctattttggggtctcgtttgcccagggagggcttggctccaccactttcctcccccagcctttgggcagcaggtcacccctgttcaggctctgagggtgccccctcctggtcctgtcctcaccaccccttccccacctcctgggaaaaaaaaaaaaaaaaaaaaaaaagctggtttaaagcagagagcctgagggctaaatttaactgtccgagtcggaatccatctctgagtcacccaagaagctgccctggcctcccgtccccttcccaggcctcaacccctttctcccacccagccccaacccccagccctcaccccctagcccccagttctggagcttgtcgggagcaagggggtggttgctactgggtcactcagcctcaattggccctgttcagcaatgggcaggttcttcttgaaattcatcacacctgtggcttcctctgtgctctacctttttattggggtgacagtgtgacagctgagattctccatgcattccccctactctagcactgaagggttctgaagggccctggaaggagggagcttggggggctggcttgtgaggggttaaggctgggaggcgggaggggggctggaccaaggggtggggagaaggggaggaggcctcggccggccgcagagagaagtggccagagaggcccaggggacagccagggacaggcagacatgcagccagggctccagggcctggacaggggctgccaggccctgtgacaggaggaccccgagcccccggcccggggaggggccatggtgctgcctgtccaacatgtcagccgaggtgcggctgaggcggctccagcagctggtgttggacccgggcttcctggggctggagcccctgctcgaccttctcctgggcgtccaccaggagctgggcgcctccgaactggcccaggacaagtacgtggccgacttcttgcagtggggtgagtgcctaccctcggggctcctgcagatggggtgggggtggggcagcagacagctctgggcacagaggcctggctgttgggggggggcagcatggcaggatgggcatggggagatcctcccatcctggggctcagagtgtggacctgggccctggggcaacatttctctgtcctatgccaccactctggaggggcagagtaaggtcagcagaggctagggtggctgtgactcagagccatggcttaggagtcacagcaggctaggctgccaacagcctcccatggcctctctgcaccccgcctcagggtcagggtcagggtcatgctgggagctccctctcctaggaccctccccccaaaagtgggctctatggccctctcccctggtttcctgtggcctggggcaagccaggagggccagcatggggcagctgccaggggcgcagccgacaggcaggtgttcggcgccagcctctccagctgccccaacaggtgcccaggcgctgggagggcggtgactcacgcgggccctgtgggagaaccagctttgcagacaggcgccaccagtgccccctcctctgcgatccaggagggacaactttgggttcttctgggtgtgtctccttctttagtaggttctgcacccacccccacccccagccccaaagtctcggttcctatgagccgtgtgggtcagacaccattcccgccaccccgggtccctgcgtcctttagttctcctggcccagggcctccaaccttccagctgtcccacaaaaccccttcttgcaagggctttccagggcctggggccagggctggaaggaggatgcttccgcttctgccagctgccttgtctgcccaacctcctccccaagcccaggactcgggctcactggtcactggtttctttcattcccagcaccctgctcctctggccctcatatgtctggccctcagtgactggtgtttggtttttgggctgtgtgtaacaaactgtgtgtgacacttgtttcctgtttctccgccttcccctgcttcctcttgtgtccatctctttctgacccaggcctggttcctttccctcctcctcccatttcacagatgggaaggtggcggccaagaagggccaggccattcagcctctggaaaaaccttctcccaacctcccacagcccctaatgactctcctggcctccctttagtagaggatgaagttgggttggcagggtaaactgagaccgggtggggtaggggtctggcgctcccgggaggagcactccttttgtggcccgagctgcatctcgcggcccctcccctgccaggcctggggcgggggagggggccagggttcctgctgccttaaaagggctcaatgtcttggctctctcctccctcccccgtcctcagccctggctggttcgtccctgctggcccactctcccggaaccccccggaacccctctctttcctccagaacccactgtctcctctccttccctcccctcccatacccaaccctctctccatcctgtcctccacttcttccacccccgggagagccaggcctcccctgtgccccacagtgccctgaggccacaagcctccaccccagctggtccccacccaggctgcccagtttaacattcctagtcataggaccttgacttctgagaggcctgattgtcatctgtaaataaggggtaggactaaagcactcctcctggaggactgagagatgggctggaccggagcacttgagtctgggatatgtgaccatgctacctttgtctccctgtcctgttccttcccccagccccaaatccagggttttccaaagtgtggttcaagaaccacctgcatctgaatctagaggtactggatacaaccccacgtctgggccgttacccaggacattctacatgagaacgtgggggtggggccctggctgcacctgaactgtcacctggagtcagggtggaaggtggaagaactgggtcttatttccttctccccttgttctttagggtctgtccttctgcagactccgttaccccaccctaaccatcctgcacacccttggagccctctgggccaatgccctgtcccgcaaagggcttctcaggcatctcacctctatgggagggcatttttggcccccagaaccttacacggtgtttatgtggggaagcccctgggaagcagacagtcctagggtgaagctgagaggcagagagaaggggagacagacagagggtggggctttcccccttgtctccagtgccctttctggtgaccctcggttcttttcccccaccacccccccagcggagcccatcgtggtgaggcttaaggaggtccgactgcagagggacgacttcgagattctgaaggtgatcggacgcggggcgttcagcgaggtaagccgaaccgggcgggagcctgacttgactcgtggtgggcggggcataggggttggggcgggcccttagaaattgatgaatgaccgagccttagaacctagggctgggctggaggcggggcttgggaccaatgggcgtggtgtggcaggtggggcggggccacggctgggtgcagaagcgggtggagttgggtctgggcgagcccttttgttttcccgccgtctccactctgtctcactatctcgacctcaggtagcggtagtgaagatgaagcagacgggccaggtgtatgccatgaagatcatgaacaagtgggacatgctgaagaggggcgaggtgaggggctgggcggacgtggggggctttgaggatccgcgccccgtctccggctgcagctcctccgggtgccctgcaggtgtcgtgcttccgtgaggagagggacgtgttggtgaatggggaccggcggtggatcacgcagctgcacttcgccttccaggatgagaactacctggtgagctccgggccggggggactaggaagagggacaagagcccgtgctgtcactggacgaggaggtggggagaggaagctctaggattgggggtgctgcccggaaacgtctgtgggaaagtctgtgtgcggtaagagggtgtgtcaggtggatgaggggccttccctatctgagacggggatggtgtccttcactgcccgtttctggggtgatctgggggactcttataaagatgtctctgttgcggggggtctcttacctggaatgggataggtcttcaggaattctaacggggccactgcctagggaaggagtgtctgggacctattctctgggtgttgggtggcctctgggttctctttcccagaacatctcagggggagtgaatctgcccagtgacatcccaggaaagtttttttgtttgtgtttttttttgaggggcgggggcgggggccgcaggtggtctctgatttggcccggcagatctctatggttatctctgggctggggctgcaggtctctgcccaaggatggggtgtctctgggaggggttgtcccagccatccgtgatggatcagggcctcaggggactaccaaccacccatgacgaaccccttctcagtacctggtcatggagtattacgtgggcggggacctgctgacactgctgagcaagtttggggagcggattccggccgagatggcgcgcttctacctggcggagattgtcatggccatagactcggtgcaccggcttggctacgtgcacaggtgggtgcagcatggccgaggggatagcaagcttgttccctggccgggttcttggaaggtcagagcccagagaggccagggcctggagagggaccttcttggttggggcccaccggggggtgcctgggagtaggggtcagaactgtagaagccctacaggggcggaacccgaggaagtggggtcccaggtggcactgcccggaggggcggagcctggtgggaccacagaagggaggttcatttatcccacccttctcttttcctcccgtgcagggacatcaaacccgacaacatcctgctggaccgctgtggccacatccgcctggccgacttcggctcttgcctcaagctgcgggcagatggaacggtgagccagtgccctggccacagagcaactggggctgctgatgagggatggaaggcacagagtgtgggagcgggactggatttggaggggaaaagaggtggtgtgacccaggcttaagtgtgcatctgtgtggcggagtattagaccaggcagagggaggggctaagcatttggggagtggttggaaggagggcccagagctggtgggcccagaggggtgggcccaagcctcgctctgctccttttggtccaggtgcggtcgctggtggctgtgggcaccccagactacctgtcccccgagatcctgcaggctgtgggcggtgggcctgggacaggcagctacgggcccgagtgtgactggtgggcgctgggtgtattcgcctatgaaatgttctatgggcagacgcccttctacgcggattccacggcggagacctatggcaagatcgtccactacaaggtgagcacggccgcagggagacctggcctctcccggtaggcgctcccaggctatcgcctcctctccctctgagcaggagcacctctctctgccgctggtggacgaaggggtccctgaggaggctcgagacttcattcagcggttgctgtgtcccccggagacacggctgggccggggtggagcaggcgacttccggacacatcccttcttctttggcctcgactgggatggtctccgggacagcgtgcccccctttacaccggatttcgaaggtgccaccgacacatgcaacttcgacttggtggaggacgggctcactgccatggtgagcgggggcggggtaggtacctgtggcccctgctcggctgcgggaacctccccatgctccctccataaagttggagtaaggacagtgcctaccttctggggtcctgaatcactcattccccagagcacctgctctgtgcccatctactactgaggacccagcagtgacctagacttacagtccagtgggggaacacagagcagtcttcagacagtaaggccccagagtgatcagggctgagacaatggagtgcagggggtgggggactcctgactcagcaaggaaggtcctggagggctttctggagtggggagctatctgagctgagacttggagggatgagaagcaggagaggactcctcctcccttaggccgtctctcttcaccgtgtaacaagctgtcatggcatgcttgctcggctctgggtgcccttttgctgaacaatactggggatccagcacggaccagatgagctctggtccctgccctcatccagttgcagtctagagaattagagaattatggagagtgtggcaggtgccctgaagggaagcaacaggatacaagaaaaaatgatgggcggcaggcaacgggtgggctcacgcctgtaacccccagcaatttggcaggccgaagtgggtggattgcttgagcccaggagttcgagaccagcctgggcaatgtggtgagacccccgtctctacaaaaatgttttaaaaattggttgggcgtggtggcgcatgcctgtatactcagctactagggtggccgacgtgggcttgagcccaggaggtcaaggctgcagtgagctgtgattgtgccactgcactccagcctgggcaacggagagagactctgtctcaaaaataagataaactgaaattaaaaaataggctgggctggccgggcgtggtggctcacgcctgtaatctcagcactttgggaggccgaggcgggtggatcacgaggtcagaagatggagaccagcctggccagcgtggcgaaaccccgtctctacccaaaaatataaaaaattagccaggcgtggtagagggcgcctgtaatctcagctactcaggacgctgaggcaggagaatcgcctgaacctgggaggcggaggttgcagtgagctgagattgcaccactgcactccagcctgggtaacagagcgagactccgtatcaaagaaaaagaaaaaagaaaaaatgctggaggggccactttagataacccctgagttggggctggtttggggggaacatgtaagccaagatccaaaagcagtgaggggcccgccctgacgactgctgctcacatctgtgtgtcttgcgcaggagacactgtcggacattcgggaaggtgcgccgctaggggtccacctgccttttgtgggctactcctactcctgcatggccctcaggtaagcactgccctggacggcctccaggggacacgaggctgcttgagcttcctgggtcctgctccttggcagccaatggagttgcaggatcagtcttggaacctcactgtttggggcccacagactcctaagaggccagagttggaggaccttaaatttctcagatctatgtacttcaaatgttagattgaattttaaaacctcagagtcacagactgggcttcccagaatcttgtaaccattaacttttacgtctgtagtacacagagccacaggacttcagaacttggcaaatatgaagtttagacttttacaatcagttgtaaaagaatgcaaattctttgaatcagccatataacaataaggccatttaaaagtattaatttaggcgggccgcggtggctcacgcctgtaatcctagcactttgggaggccaaggcaggtggatcatgaggtcaggagatcgagaccatcctggctaacacggtgaaaccccgtctctactaaaaatacaaaaaaattagccgggcatggtggcgggcgcttgcggtcccagctacttgggaggcgaggcaggagaatggcatgaacccgggaggcggagcttgcagtgagccgagatcatgccactgcactccagcctgggcgacagagcaagactccgtctcaaaaaaaaaaaaaaaaaagtttttatttaggccgggtgtggcggctcacgcctgtaatccagtgctttgggaggatgaggtgggtggatcactgaggtcaggagttcgagaccagcctgaccacgtggagaaacctcatctctactaaaaaacaaaattagccaggcgtggtggcatatacctgtaatcccagctactcaggaggctgaggcaggagaatcagaacccaggagggggaggttgtggtgagctgagatcgtgccattgcattccagcctgggcaacaagagtgaaacttcatctccaaaaaaaaaaaaaaaaagtactaaatttacaggctgggcatggtggctcacgcttggaatcccagcactttgggaggctgaagtggacggattgcttcagcccaggagttcaagaccagcctgagcaacataatgagaccctgtctctaccaaaaattgaaaaaatcgtgccaggcatggtggtctgtgcctgcagtcctagctactcaggagtctgaagtaggagaatcacttgagcctggagtttgaggcttcagtgagccatgatagattccagcctaggcaacaaagtgagacctggtctcaacaaaagtattaattacacaaataatgcattgcttatcacaagtaaattagaaaatacagataaggaaaaggaagttgatatctcgtgagctcaccagatgggcagtggtccctggctcacacgtgtactgacacatgtttaaatagtggagaacaggtgtttttttggtttgtttttttccccttcctcatgctactttgtctaagagaacagttggttttctagtcagcttttattactgggcaacattacacatactataccttatcattaatgaactccagcttgattctgaaccgctgcggggcctgaacggtgggtcaggattgaacccatcctctattagaacccaggcgcatgtccaggatagctaggtcctgagccgtgttcccacaggagggactgctgggttggaggggacagccacttcataccccagggaggagctgtccccttcccacagctgagtggggtgtgctgacctcaagttgccatcttggggtcccatgcccagtcttaggaccacatctgtggaggtggccagagccaagcagtctccccatcaggtcggcctccctgtcctgaggccctgagaagaggggtctgcagaaggtttagaaagagcagctcccaggggcccaaggccaggagaggggcagggcttttcctaagcagaggaggggctattggcctacctgggactctgttctcttcgctctgctgctccccttcctcaaatcaggaggtcttggaagcagctgcccctacccacaggccagaagttctggttctccaccagagaatcagcattctgtctccctccccactccctcctcctctccccagggacagtgaggtcccaggccccacacccatggaagtggaggccgagcagctgcttgagccacacgtgcaagcgcccagcctggagccctcggtgtccccacaggatgaaacagtaagttggtggaggggagggggtccgtcagggacaattgggagagaaaaggtgagggcttcccgggtggcgtgcactgtagagccctctagggacttcctcgaacagaagcagacagaaaccacggagagacgaggttacttcagacatgggacggtctctgtagttacagtggcgcattaagtaagggtgtgtgtgttgctggcgatctgagaagtcgatctttgagctgagcgctggtgaaggagaaacaagccatggaaggaaaggtgccaagtggtcaggcgagagcctccagggcaaaggccttgggcaggtgggaatcctgatttgttcctgaaaggtagtttgtctgagtcactacctgagaaggctggagaggccagcaggaaacacaacccagcacggcctgttgtcgtgtgggcactagggagctggagggattttgagcaccagagggacatagggtgtgttagtgtgtgagcaccagccctctggtgccctgtgtagatttagaggaccagactcagggatgggtctgagggaggtagagaagggagggggcttggatcattgcaggagctatggggattccagaaatgttgagggggcggaggagtaggggataaacaaggattcctagcctggaaccagtgtccaagtcctgagtcttccaggagccacaggcagccttaagcctggtccccacacacaggctgaagtggcagttccagcggctgtccctgcggcagaggctgaggccgaggtgacgctgcgggagctccaggaagccctggaggaggaggtgctcacccggcagagcctgagccgggagatggaggccatccgcacggacaaccagaacttcgccaggtcgggatcggggccggggccggggccgggatgcgggccggtggcaacccttggcatcccctctcgtccggcccggacggactcaccgtccttacctccccacagtcaactacgcgaggcagaggctcggaaccgggacctagaggcacacgtccggcagttgcaggagcggatggagttgctgcaggcagagggagccacaggtgagtccctcatgtgtccccttccccggaggaccgggaggaggtgggccgtctgctccgcggggcgtgtatagacacctggaggagggaagggacccacgctggggcacgccgcgccaccgccctccttcgcccctccacgcgccctatgcctctttcttctccttccagctgtcacgggggtccccagtccccgggccacggatccaccttcccatgtaagacccctctctttcccctgcctcagacctgctgcccattctgcagatcccctccctggctcctggtctccccgtccagatatagggctcaccctacgtctttgcgactttagagggcagaagccctttattcagccccagatctccctccgttcaggcctcaccagattccctccgggatctccctagataacctccccaacctcgattcccctcgctgtctctcgccccaccgctgagggctgggctgggctccgatcgggtcacctgtcccttctctctccagctagatggccccccggccgtggctgtgggccagtgcccgctggtggggccaggccccatgcaccgccgccacctgctgctccctgccagggtacgtccggctgcccacgcccccctccgccgtcgcgccccgcgctccacccgccccgtgccacccgcttagctgcgcatttgcggggctgggcccacggcaggagggcggatcttcgggcagccaatcaacacaggccgctaggaagcagccaatgacgagttcggacgggattcgaggcgtgcgagtggactaacaacagctgtaggctgttggggcgggggcggggcgcagggaagagtgcgggcccacctatgggcgtaggcggggcgagtcccaggagccaatcagaggcccatgccgggtgttgacctcgccctctccccgcaggtccctaggcctggcctatcggaggcgctttccctgctcctgttcgccgttgttctgtctcgtgccgccgccctgggctgcattgggttggtggcccacgccggccaactcaccgcagtctggcgccgcccaggagccgcccgcgctccctgaaccctagaactgtcttcgactccggggccccgttggaagactgagtgcccggggcacggcacagaagccgcgcccaccgcctgccagttcacaaccgctccgagcgtgggtctccgcccagctccagtcctgtgtaccgggcccgccccctagcggccggggagggaggggccgggtccgcggccggcgaacggggctcgaagggtccttgtagccgggaatgctgctgctgctgctgctgctgctgctgctgctggggggatcacagaccatttctttctttcggccaggctgaggccctgacgtggatgggcaaactgcaggcctgggaaggcagcaagccgggccgtccgtgttccatcctccacgcacccccacctatcgttggttcgcaaagtgcaaagctttcttgtgcatgacgccctgctctggggagcgtctggcgcgatctctgcctgcttactcgggaaatttgcttttgccaaacccgctttttcggggatcccgcgcccccctcctcacttgcgctgctctcggagccccagccggctccgcccgcttcggcggtttggatatttattgacctcgtcctccgactcgctgacaggctacaggacccccaacaaccccaatccacgttttggatgcactgagaccccgacattcctcggtatttattgtctgtccccacctaggacccccacccccgaccctcgcgaataaaaggccctccatctgccc

SEQ ID NO: 28820 - DNA, 4077 bp, Homo Sapiens
gaattcccagctctctgctcgctctgctcgcagtcacagacacttgagcacacgcgtacacccagacatcttcgggctgctattggattgactttgaaggttctgtgtgggtcgccgtggctgcatgtttgaatcaggtggagaagcacttcaacgctggacgaagtaaagattattgttgttattttttttttctctctctctctctcttaagaaaggaaaatatcccaaggactaatctgatcgggtcttccttcatcaggaacgaatgcaggaatttgggaactgagctgtgcaagtgctgaagaaggagatttgtttggaggaaacaggaaagagaaagaaaaggaaggaaaaaatacataatttcagggacgagagagagaagaaaaacggggactatggggagaaaaaagattcagattacgaggattatggatgaacgtaacagacaggtgacatttacaaagaggaaatttgggttgatgaagaaggcttatgagctgagcgtgctgtgtgactgtgagattgcgctgatcatcttcaacagcaccaacaagctgttccagtatgccagcaccgacatggacaaagtgcttctcaagtacacggagtacaacgagccgcatgagagccggacaaactcagacatcgtggagacgttgagaaagaagggccttaatggctgtgacagcccagaccccgatgcggacgattccgtaggtcacagccctgagtctgaggacaagtacaggaaaattaacgaagatattgatctaatgatcagcaggcaaagattgtgtgctgttccacctcccaacttcgagatgccagtctccatcccagtgtccagccacaacagtttggtgtacagcaaccctgtcagctcactgggaaaccccaacctattgccactggctcacccttctctgcagaggaatagtatgtctcctggtgtaacacatcgacctccaagtgcaggtaacacaggtggtctgatgggtggagacctcacgtctggtgcaggcaccagtgcagggaacgggtatggcaatccccgaaactcaccaggtctgctggtctcacctggtaacttgaacaagaatatgcaagcaaaatctcctcccccaatgaatttaggaatgaataaccgtaaaccagatctccgagttcttattccaccaggcagcaagaatacgatgccatcagtgtctgaggatgtcgacctgcttttgaatcaaaggataaataactcccagtcggctcagtcattggctaccccagtggtttccgtagcaactcctactttaccaggacaaggaatgggaggatatccatcagccatttcaacaacatatggtaccgagtactctctgagtagtgcagacctgtcatctctgtctgggtttaacaccgccagcgctcttcaccttggttcagtaactggctggcaacagcaacacctacataacatgccaccatctgccctcagtcagttgggagcttgcactagcactcatttatctcagagttcaaatctctccctgccttctactcaaagcctcaacatcaagtcagaacctgtttctcctcctagagaccgtaccaccaccccttcgagatacccacaacacacgcgccacgaggcggggagatctcctgttgacagcttgagcagctgtagcagttcgtacgacgggagcgaccgagaggatcaccggaacgaattccactcccccattggactcaccagaccttcgccggacgaaagggaaagtccctcagtcaagcgcatgcgactttctgaaggatgggcaacatgatcagattattacttactagtttttttttttttcttgcagtgtgtgtgtgtgctataccttaatggggaaggggggtcgatatgcattatatgtgccgtgtgtggaaaaaaaaaaagtcaggtactctgttttgtaaaagtacttttaaattgcctcagtgatacagtataaagataaacagaaatgctgagataagcttagcacttgagttgtacaacagaacacttgtacaaaatagattttaaggctaacttcttttcactgttgtgctcctttgcaaaatgtatgttacaatagatagtgtcatgttgcaggttcaacgttatttacatgtaaatagacaaaaggaaacatttgccaaaagcggcagatctttactgaaagagagagcagctgttatgcaacatatagaaaaatgtatagatgcttggacagacccggtaatgggtggccattggtaaatgttaggaacacaccaggtcacctgacatcccaagaatgctcacaaacctgcaggcatatcattggcgtatggcactcattaaaaaggatcagagaccattaaaagaggaccatacctattaaaaaaaaatgtggagttggagggctaacatatttaattaaataaataaataaatctgggtctgcatctcttattaaataaaaatataaaaatatgtacattacattttgcttattttcatataaaaggtaagacagagtttgcaaagcatttgtggctttttgtagtttacttaagccaaaatgtgtttttttccccttgatagcttcgctaatattttaaacagtcctgtaaaaaaccaaaaaggactttttgtatagaaagcactaccctaagccatgaagaactccatgctttgctaaccaagataactgttttctctttgtagaagttttgtttttgaaatgtgtatttctaattatataaaatattaagaatcttttaaaaaaatctgtgaaattaacatgcttgtgtatagctttctaatatatataatattatggtaatagcagaagttttgttatcttaatagcgggaggggggtatatttgtgcagttgcacatttgagtaactattttctttctgttttcttttactctgcttacattttataagtttaaggtcagctgtcaaaaggataacctgtggggttagaacatatcacattgcaacaccctaaattgtttttaatacattagcaatctattgggtcaactgacatccattgtatatactagtttctttcatgctatttttattttgttttttgcatttttatcaaatgcagggcccctttctgatctcaccatttcaccatgcatcttggaattcagtaagtgcatatcctaacttgcccatattctaaatcatctggttggttttcagcctagaatttgatacgctttttagaaatatgcccagaatagaaaagctatgttggggcacatgtcctgcaaatatggccctagaaacaagtgatatggaatttacttggtgaataagttataaattcccacagaagaaaaatgtgaaagactgggtgctagacaagaaggaagcaggtaaagggatagttgctttgtcatccgtttttaattattttaactgacccttgacaatcttgtcagcaatataggactgttgaacaatcccggtgtgtcaggacccccaaatgtcacttctgcataaagcatgtatgtcatctattttttcttcaataaagagatttaatagccatttcaagaaatcccataaagaacctctctatgtccctttttttaatttaaaaaaatgactcttgtctaatattcgtctataagggattaattttcagaccctttaataagtgagtgccataagaaagtcaatatatattgtttaaaagatatttcagtctaggaaagattttccttctcttggaatgtgaagatctgtcgattcatctccaatcatatgcattgacatacacagcaaagaagatataggcagtaatatcaacactgctatatcatgtgtaggacatttcttatccattttttctcttttacttgcatagttgctatgtgtttctcattgtaaaaggctgccgctgggtggcagaagccaagagaccttattaactaggctatatttttcttaacttgatctgaaatccacaattagaccacaatgcacctttggttgtatccataaaggatgctagcctgccttgtactaatgttttatatatt

SEQ ID NO: 28821 - DNA, 4707 bp, Homo Sapiens
cggaggctcgcacggaggcaagaacttattcaacaagtttacctccctgctttcctcttttcgatgtgcgttttcggacatgcggaggttactggaaccgtgttggtggattttgttcctgaaaatcaccagttccgtgctccattatgtcgtgtgcttccccgcgttgacagaaggctacgttggggccctgcacgagaatagacacggcagcgcagtgcagatccgcaggcgcaaggcttcaggcgacccgtactgggcctactctggtgcctatggtcctgagcactgggtcacgtctagtgtcagctgtgggagccgtcaccagtctcctattgacattttagaccagtatgcgcgtgttggggaagaataccaggaactgcaactcgatggcttcgacaatgagtcttctaacaaaacctggatgaaaaacacagggaaaacagtcgccatccttctgaaagacgactattttgtcagtggagctggtctacctggcagattcaaagctgagaaggtggaatttcactggggccacagcaatggctcagcgggctctgaacacagcatcaatggcaggaggtttcctgttgagatgcagattttcttttacaatccagatgactttgacagctttcaaaccgcaatttctgagaacagaataatcggagccatggccatattttttcaagtcagtccgagggacaattctgcactggatcctattatccacgggttgaagggtgtcgtacatcatgagaaggagacctttctggatcctttcgtcctccgggacctcctgcctgcatccctgggcagctattatcggtacacaggttccttgaccacaccaccgtgtagcgaaatagtggagtggatagtcttccggagacccgtccccatctcttaccatcagcttgaggctttttattccatcttcaccacggagcagcaagaccatgtcaagtcggtggagtatctgagaaataactttcgaccacagcagcgtctgcatgacagggtggtgtccaagtccgccgtccgtgactcctggaaccacgacatgacagacttcttagaaaacccactggggacagaagcctctaaagtttgcagctctccacccatccacatgaaggtgcagcctctgaaccagacggcactgcaggtgtcctggagccagccggagactatctaccacccacccatcatgaactacatgatctcctacagctggaccaagaatgaggacgagaaggagaagacgtttacaaaggacagcgacaaagacttgaaagccaccattagccatgtctcacccgatagcctttacctgttccgagtccaggccgtgtgtcggaacgacatgcgcagcgactttagccagacgatgctgtttcaagctaataccactcgaatattccaagggaccagaatagtgaaaacaggagtgcccacagcgtctcctgcctcttcagccgacatggcccccatcagctcggggtcttctacctggacgtcctctggcatcccattctcatttgtttccatggcaactgggatgggcccctcctccagtggcagccaggccacagtggcctcggtggtcaccagcacgctgctcgccggcctggggttcggcggtggtggcatctcctctttccccagcactgtgtggcccacgcgcctcccgacggccgcctcagccagcaagcaggcggctaggccagtcctagccaccacagaggccttggcttctccagggcccgatggtgattcgtcaccaaccaaggacggcgagggcaccgaggaaggagagaaggatgagaaaagcgagagtgaggatggggagcgggagcacgaggaggatggagagaaggactccgaaaagaaggagaagagtggggtgacccacgctgccgaggagcggaatcagacggagcccagccccacaccctcgtctcctaacaggactgccgagggagggcatcagactatacctgggcatgagcaggatcacactgccgtccccacagaccagacgggcggaaggagggatgccggcccaggcctggaccccgacatggtcacctccacccaagtgccccccaccgccacagaggagcagtatgcagggagtgatcccaagaggcccgaaatgccatctaaaaagcctatgtcccgcggggaccgattttctgaagacagcagatttatcactgttaatccagcggaaaaaaacacctctggaatgataagccgccctgctccagggaggatggagtggatcatccctctgattgtggtatcagccttgaccttcgtgtgcctcatccttctcattgctgtgctcgtttactggagagggtgtaacaaaataaagtccaagggctttcccagacgtttccgtgaagtgccttcttctggggagagaggagagaaggggagcagaaaatgttttcagactgctcatttctatgtggaagacagcagttcacctcgagtggtccctaatgaaagtattcctattattcctattccggatgacatggaagccattcctgtcaaacagtttgtcaaacacatcggtgagctctattctaataaccagcatgggttctctgaggattttgaggaagtccagcgctgtactgctgatatgaacatcactgcagagcattccaatcatccagaaaacaagcacaaaaacagatacatcaacattttagcatatgatcacagtagggtgaagttaagacctttaccaggaaaagactctaagcacagcgactacattaatgcaaactatgttgatggttacaacaaagcaaaagcctacattgccacccaaggacctttgaagtctacatttgaagatttctggaggatgatttgggaacaaaacactggaatcattgtgatgattacgaaccttgtggaaaaaggaagacgaaaatgtgatcagtattggccaacagagaacagtgaggaatatggaaacattattgtcacgctgaagagcacaaaaatacatgcctgctacactgttcgtcgtttttcaatcagaaatacaaaagtgaaaaagggtcagaagggaaatcccaagggtcgtcagaatgaaagggtagtgatccagtatcactatacacagtggcctgacatgggagttcccgagtatgcccttccagtactgactttcgtgaggagatcctcagcagctcggatgccagaaacgggccctgtgttggtgcactgcagtgctggtgtgggcagaacaggcacctatattgtaatagacagcatgctgcaacagataaaagacaaaagcacagttaacgtcctgggattcctgaagcatatcaggacacagcgtaactacctcgtccagactgaggagcagtacattttcatccatgatgccttgttggaagccattcttggaaaggagactgaagtatcttcaaatcagctgcacagctatgttaacagcatccttataccaggagtaggaggaaagacacgactggaaaagcaattcaagctggtcacacagtgtaatgcaaaatatgtggaatgtttcagtgctcagaaagagtgtaacaaagaaaagaacagaaactcttcagttgtgccatctgagcgtgctcgagtgggtcttgcaccattgcctggaatgaaaggaacagattacattaatgcttcttatatcatgggctattataggagcaatgaatttattataactcagcatcctctgccacatactacgaaagatttctggcgaatgatttgggatcataacgcacagatcattgtcatgctgccagacaaccagagcttggcagaagatgagtttgtgtactggccaagtcgagaagaatccatgaactgtgaggcctttaccgtcacccttatcagcaaagacagactgtgcctctctaatgaagaacaaattatcatccatgactttatccttgaagctacacaggatgactatgtcttagaagttcggcactttcagtgtcccaaatggcctaacccagatgcccccataagtagtacctttgaacttatcaacgtcatcaaggaagaggccttaacaagggatggtcccaccattgttcatgatgagtatggagcagtttcagcaggaatgttatgtgcccttaccaccctgtcccagcaactggagaatgaaaatgctgtggatgttttccaggttgcaaaaatgatcaatcttatgaggcctggagtattcacagacattgaacaataccagttcatctataaagcaaggcttagcttggtcagcactaaagaaaatggaaatggtcccatgacagtagacaaaaatggtgctgttcttattgcagatgaatcagaccctgctgagagcatggagtccctagtgtgactggaatcctgaaagggcacttaatttgtaaacttctgaagactgagaacttttttgaggccttttttgccagactctaggttatacaataacccagttacttttttacactgataaaagttttgatatttattttttgccattttatgtcttaatggtatcctactgagcatttgcacctctgttcatttcacacagtgaaacgcaattttacctagtttgcactatatgatcagtgttactgcctataatcttatacaacagcaaaccctgatgtgacattccatgac

SEQ ID NO: 28822 - DNA, 6912 bp, Homo Sapiens
cgccaaatttctcccctgaagcagaggtggtagccaacggctccatgtctctgaggagcggcgggcggcggcgcgcggacccaggcgcggatggcgaggccagcagggatgatggcgccacttcctcagtttcggcactcaagcgcctggaacggagtcagtggacggataagatggatttgcggtttggttttgagcggctgaaggagcctggtgagaagacaggctggctcattaacatgcatcctaccgagattttagatgaagataagcgcttaggcagtgcagtggattactactttattcaagatgacggaagcagatttaaggtggctttgccctataaaccgtatttctacattgcgaccagaaagggttgtgagcgagaagtttcatcttttctctccaagaagtttcagggcaaaattgcaaaagtggagactgtccccaaagaggatctggacttgccaaatcacttggtgggtttgaagcgaaattacatcaggctgtccttccacactgtggaggatcttgtcaaagtgaggaaggagatctcccctgccgtgaagaagaacagggagcaggatcacgccagcgacgcgtacacagctctgctttccagtgttctgcagaggggcggtgtcattactgatgaagaggaaacctctaagaagatagctgaccagttggacaacattgtggacatgcgcgagtacgatgttccctaccacatccgcctctccattgacctgaagatccacgtggctcattggtacaatgtcagataccgaggaaatgcttttccggtagaaatcacccgccgagatgaccttgttgaacgacctgaccctgtggttttggcatttgacattgagacgaccaaactgcccctcaagtttcctgatgctgagacagaccagattatgatgatttcctacatgatcgatggccagggctacctcatcaccaacagggagattgtttcagaagatattgaagattttgagttcacccccaagccagaatatgaaggccccttttgtgtcttcaatgaacccgatgaggctcatctgatccaaaggtggtttgaacacgtccaggagaccaaacccaccatcatggtcacctacaacggggacttttttgactggccatttgtggaggcccgggcagcagtccacggtctgagcatgcagcaggagataggcttccagaaggacagccagggggagtacaaggcgccccagtgcatccacatggactgcctcaggtgggtgaagagggacagttaccttcctgtgggcagtcataatctcaaggcggccgccaaggccaagctaggctatgatcccgtggagctagacccggaggacatgtgccggatggccacggagcagccccagactctggccacgtattctgtgtcagatgctgtcgccacttactacctgtacatgaagtacgtccacccattcatctttgctctgtgcaccattattcccatggagcccgacgaggtgctgcggaagggctctggcactctgtgtgaggccttgctgatggtgcaggccttccacgccaacatcatcttccccaacaagcaagagcaggagttcaataagctgacggacgacggacacgtgctggactctgagacctacgtcgggggccacgtggaggccctcgagtctggggttttccgcagcgatatcccttgccggtttaggatgaatcctgccgcctttgacttcctgctgcagcgggttgagaagaccttgcgccacgcccttgaggaagaggagaaagtgcctgtggagcaagtcaccaactttgaagaggtgtgtgatgagattaagagcaagcttgcctccctgaaggacgttcccagccgcatcgagtgtccactcatctaccacctggacgtgggggccatgtaccccaacatcatcctgaccaaccgcctgcagccctctgccatggtggacgaagccacctgtgctgcctgtgacttcaataagcctggagcaaactgccagcggaagatggcctggcagtggaggggcgagttcatgccagccagtcgcagcgaataccatcggatccagcaccagctggagtcagagaagttcccccccttgttcccagaggggccagctcgggcctttcatgaactgtcccgcgaggaacaggcgaaatacgagaagagaaggctggcggattactgccggaaagcctacaagaagatccacatcaccaaggtggaagagcgtctcaccaccatctgccagcgggaaaactccttctacgtggacaccgtgcgtgccttccgggacaggcgttacgagttcaaagggctccacaaggtgtggaaaaagaagctctcggcggccgtggaggtgggcgacgcggctgaggtgaagcgctgcaagaacatggaggtgctgtatgactcgctgcagctggcccacaagtgcatcctgaactccttctatggctatgtcatgcgcaagggggctcgctggtactccatggagatggctggcatcgtctgcttcacaggggccaacatcatcacccaggcacgggagctgatcgagcagattgggaggcccttagagctggacacagatggtatatggtgcgtcctgcccaacagcttcccagaaaattttgtcttcaagacgaccaatgtgaagaagcccaaagtgaccatctcctacccaggcgccatgttgaacatcatggtcaaggaaggcttcaccaatgaccagtaccaggagctggctgagccgtcctcactcacctacgtcacccgctcagagaacagcatcttttttgaggttgatgggccctaccttgccatgattcttccagcctccaaggaagaaggcaagaaattgaagaagaggtatgctgtgttcaatgaagacggttctctggctgagctcaagggctttgaggtcaaacgccgcggggaactgcagctgattaagatcttccaatcctcggtgtttgaggccttcctcaagggcagcacgctggaagaggtgtatggctctgtagccaaggtggctgactactggctggacgtgctgtacagcaaggcagccaacatgcctgactctgagctattcgagctcatctctgagaaccgttccatgtctcggaagctggaagattacggggagcagaagtctacatccatcagcacagcaaagcgcctggccgagttcctgggagaccagatggtcaaggatgcagggctgagttgccgctacatcatctcccgcaagcccgagggctcccctgtcacggagagggccatcccacttgccattttccaagcagagcccacggtgaggaagcactttctccggaaatggctcaagagctcttcccttcaagactttgatattcgagcaattctggattgggactactacattgagcggctgggaagcgccatccagaagatcatcaccatccctgcggccctgcagcaggtaaagaacccagtgccacgtgtcaaacaccccgactggctgcacaaaaaactgctggagaagaatgatgtctacaagcagaagaagatcagtgagctcttcaccctggagggcaggagacaggtcacgatggccgaggcctcagaagacagtccgaggccaagtgctcctgacatggaggacttcggcctcgtaaagctgcctcacccagcagcccctgtcactgtgaagaggaagcgagttctttgggagagccaggaggagtcccaggacctcacgccgactgtgccctggcaggaaatcttggggcagcctcccgccctgggaaccagccaggaggaatggcttgtctggctccggttccacaagaagaagtggcagctgcaggcccggcagcgcctcgcccgcaggaagaggcagcgtctggagtcggcagagggtgtgctcaggcccggggccatccgggatggtcctgccacggggctggggagcttcttgcgaagaactgcccgcagcatcctggaccttccgtggcagattgtgcagatcagcgagaccagccaggccggcctgttcaggctgtgggcgctcgttggcagtgacttgcactgcatcaggctgagcatcccccgtgtgttctacgtgaaccagcgagtcgctaaagcggaggagggtgcttcgtatcgcaaggtaaatcgggtccttcctcgctccaacatggtctacaatctctatgagtattcagtgccagaggacatgtaccaggaacacatcaacgagatcaacgctgagctgtcagcgccagacatcgagggcgtatatgagactcaggttccgttactgttccgggccctggtgcacctgggctgtgtgtgtgtggtcaataaacagctggtgaggcacctttcaggctgggaagcagagacctttgctcttgagcacctggagatgcgctctctggcccagttcagctacctggaaccagggagtatccgccatatctacctgtaccaccacgcacaggcccacaaagcgctcttcgggatcttcatcccctcacagcgcagggcatccgtctttgtgctggacactgtgcgcagcaaccagatgcccagccttggcgccctgtactcagcagagcacggcctcctcctggagaaggtgggccctgagctcctgccaccccccaaacacaccttcgaagttcgggcagaaactgacctgaagaccatctgcagagccatccagcgattcctgctcgcctacaaggaggagcgccgggggcccacactcatcgctgttcagtccagctgggagctgaagaggctggccagtgaaattcctgtcttggaggaattcccactggtgcctatctgtgtggctgacaagatcaactatggggtcctggactggcagcgccatggagcccggcgcatgatccgtcactacctcaacctggacacctgcctgtcgcaggccttcgagatgagcaggtactttcacattcccattgggaacctaccagaggacatctccacattcggctccgacctcttctttgcccgccacctccagcgccacaaccacctgctctggctgtcccctacagcccgccctgacctgggtggaaaggaggctgatgacaactgtcttgtcatggagttcgatgaccaagccactgttgagatcaacagttcaggctgttactccacagtgtgtgtggagctggaccttcagaacctggccgtcaacaccattctccagtctcaccatgtcaacgacatggagggggccgacagcatggggatcagcttcgacgtgatccagcaggcctccctggaggacatgatcacgggtggtcaggctgccagtgccccggccagctacgatgagacagccctgtgctctaacaccttcaggatcctgaagagcatggtcgtgggctgggtgaaggagatcacccagtaccacaacatctatgcagacaaccaggtgatgcacttctaccgctggcttcggtcgccatcctctctgcttcatgaccctgccctgcaccgcacactccacaacatgatgaagaagctcttcctgcagctcatcgctgagttcaagcgcctggggtcatcagtcatctacgccaacttcaaccgcatcatcctctgtacaaagaagcgccgtgtggaagatgccatcgcttacgtggagtacatcaccagcagcatccattcaaaggagaccttccattctctgacaatttctttctctcgatgctgggaatttcttctctggatggatccatctaactatggcggaatcaaaggaaaagtttcatctcgtattcactgtggactgcaagactcccagaaagcagggggagcagaggatgagcaggaaaatgaggacgatgaggaggaaagagatggggaggaggaggaagaggcggaggaatccaacgtggaggatttactggaaaacaactggaacattttgcagtttttgccacaggcagcctcctgccagaactacttcctcatgattgtttcagcgtacatcgtggccgtgtaccactgcatgaaggacgggctgaggcgcagtgctccagggagcacccccgtgaggaggaggggggccagccagctctcccaggaggccgagggggcggtcggagcccttcccggaatgatcaccttctctcaggattatgtcgcaaatgagctcactcagagcttcttcaccatcactcagaagattcagaagaaagtcacaggctctcggaactccactgagctctcagagatgtttcctgtcctccccggttcccacttgctgctcaataaccctgccctggagttcatcaaatacgtgtgcaaggtgctgtccctggacaccaacatcacaaaccaggtgaataagctgaaccgagacctgcttcgcctggtggatgtcggcgagttctccgaggaggcccagttccgagacccctgccgctcctacgtgcttcctgaggtcatctgccgcagctgtaacttctgccgcgacctggacctgtgtaaagactcttccttctcagaggatggggcggtcctgcctcagtggctctgctccaactgtcaggcgccctacgactcctctgccatcgagatgacgctggtggaagttctacagaagaagctgatggccttcaccctgcaggacctggtctgcctgaagtgccgcggggtgaaggagaccagcatgcctgtgtactgcacgtgcgcgggagacttcgccctcaccatccacacccaggtcttcatggaacagatcggaatattccggaacattgcccagcactacggcatgtcgtacctcctggagaccctggagtggctgctgcagaagaacccacagctgggccattagccagccc

SEQ ID NO: 28823 - DNA, 2928 bp, Homo Sapiens
aatcccaacttacactcaaagcttctttgattaagtgctaggagataaatttgcattttctcaaggaaaaggctaaaagtggtagcaggtggcatttaccgtcatggagagcagggatcataacaacccccaggagggacccacgtcctccagcggtagaagggctgcagtggaagacaatcacttgctgattaaagctgttcaaaacgaagatgttgacctggtccagcaattgctggaaggtggagccaatgttaatttccaggaagaggaagggggctggacacctctgcataacgcagtacaaatgagcagggaggacattgtggaacttctgcttcgtcatggtgctgaccctgttctgaggaagaagaatggggccacgccttttatcctcgcagcgattgcggggagcgtgaagctgctgaaacttttcctttctaaaggagcagatgtcaatgagtgtgatttttatggcttcacagccttcatggaagccgctgtgtatggtaaggtcaaagccctaaaattcctttataagagaggagcaaatgtgaatttgaggcgaaagacaaaggaggatcaagagcggctgaggaaaggaggggccacagctctcatggacgctgctgaaaaaggacacgtagaggtcttgaagattctccttgatgagatgggggcagatgtaaacgcctgtgacaatatgggcagaaatgccttgatccatgctctcctgagctctgacgatagtgatgtggaggctattacgcatctgctgctggaccatggggctgatgtcaatgtgaggggagaaagagggaagactcccctgatcctggcagtggagaagaagcacttgggtttggtgcagaggcttctggagcaagagcacatagagattaatgacacagacagtgatggcaaaacagcactgctgcttgctgttgaactcaaactgaagaaaatcgccgagttgctgtgcaaacgtggagccagtacagattgtggggatcttgttatgacagcgaggcggaattatgaccattcccttgtgaaggttcttctctctcatggagccaaagaagattttcaccctcctgctgaagactggaagcctcagagctcacactggggggcagccctgaaggatctccacagaatataccgccctatgattggcaaactcaagttctttattgatgaaaaatacaaaattgctgatacttcagaaggaggcatctacctggggttctatgagaagcaagaagtagctgtgaagacgttctgtgagggcagcccacgtgcacagcgggaagtctcttgtctgcaaagcagccgagagaacagtcacttggtgacattctatgggagtgagagccacaggggccacttgtttgtgtgtgtcaccctctgtgagcagactctggaagcgtgtttggatgtgcacagaggggaagatgtggaaaatgaggaagatgaatttgcccgaaatgtcctgtcatctatatttaaggctgttcaagaactacacttgtcctgtggatacacccaccaggatctgcaaccacaaaacatcttaatagattctaagaaagctgctcacctggcagattttgataagagcatcaagtgggctggagatccacaggaagtcaagagagatctagaggaccttggacggctggtcctctatgtggtaaagaagggaagcatctcatttgaggatctgaaagctcaaagtaatgaagaggtggttcaactttctccagatgaggaaactaaggacctcattcatcgtctcttccatcctggggaacatgtgagggactgtctgagtgacctgctgggtcatcccttcttttggacttgggagagccgctataggacgcttcggaatgtgggaaatgaatccgacatcaaaacacgaaaatctgaaagtgagatcctcagactactgcaacctgggccttctgaacattccaaaagttttgacaagtggacgactaagattaatgaatgtgttatgaaaaaaatgaataagttttatgaaaaaagaggcaatttctaccagaacactgtgggtgatctgctaaagttcatccggaatttgggagaacacattgatgaagaaaagcataaaaagatgaaattaaaaattggagacccttccctgtattttcagaagacatttccagatctggtgatctatgtctacacaaaactacagaacacagaatatagaaagcatttcccccaaacccacagtccaaacaaacctcagtgtgatggagctggtggggccagtgggttggccagccctgggtgctgatggactgatttgctggagttcagggaactacttattagctgtagagtccttggcaaatcacaacattctgggccttttaactcaccaggttgcttgtgagggatgagttgcatagctgatatgtcagtccctggcatcgtgtattccatatgtctataacaaaagcaatatatacccagactacactagtccataagctttacccactaactgggaggacattctgctaagattccttttgtcaattgcaccaaaagaatgagtgccttgacccctaatgctgcatatgttacaattctctcacttaattttcccaatgatcttgcaaaacagggattatcatccccatttaagaactgaggaacctgagactcagagagtgtgagctactggcccaagattattcaatttatacctagcactttataaatttatgtggtgttattggtacctctcatttgggcaccttaaaacttaactatcttccagggctcttccagatgaggcccaaaacatatataggggttccaggaatctcattcattcattcagtatttattgagcatctagtataagtctgggcactggatgcatgaatt

SEQ ID NO: 28824 - DNA, 2257 bp, Homo Sapiens
acggcagccgtcagggaccgtcccccaactcccctttccgctcaggcagggtcctcgcggcccatgctggccgctggggacccgcgcagcccagaccgttcccgggccggccagccggcaccatggtggccctgaggcctgtgcagcaactccaggggggctaaagggctcagagtgcaggccgtggggcgcgagggtcccgggcctgagccccgcgccatggccggggccatcgcttcccgcatgagcttcagctctctcaagaggaagcaacccaagacgttcaccgtgaggatcgtcaccatggacgccgagatggagttcaattgcgagatgaagtggaaagggaaggacctctttgatttggtgtgccggactctggggctccgagaaacctggttctttggactgcagtacacaatcaaggacacagtggcctggctcaaaatggacaagaaggtactggatcatgatgtttcaaaggaagaaccagtcacctttcacttcttggccaaattttatcctgagaatgctgaagaggagctggttcaggagatcacacaacatttattcttcttacaggtaaagaagcagattttagatgaaaagatctactgccctcctgaggcttctgtgctcctggcttcttacgccgtccaggccaagtatggtgactacgaccccagtgttcacaagcggggatttttggcccaagaggaattgcttccaaaaagggtaataaatctgtatcagatgactccggaaatgtgggaggagagaattactgcttggtacgcagagcaccgaggccgagccagggatgaagctgaaatggaatatctgaagatagctcaggacctggagatgtacggtgtgaactactttgcaatccggaataaaaagggcacagagctgctgcttggagtggatgccctggggcttcacatttatgaccctgagaacagactgacccccaagatctccttcccgtggaatgaaatccgaaacatctcgtacagtgacaaggagtttactattaaaccactggataagaaaattgatgtcttcaagtttaactcctcaaagcttcgtgttaataagctgattctccagctatgtatcgggaaccatgatctatttatgaggagaaggaaagccgattctttggaagttcagcagatgaaagcccaggccagggaggagaaggctagaaagcagatggagcggcagcgcctcgctcgagagaagcagatgagggaggaggctgaacgcacgagggatgagttggagaggaggctgctgcagatgaaagaagaagcaacaatggccaacgaagcactgatgcggtctgaggagacagctgacctgttggctgaaaaggcccagatcaccgaggaggaggcaaaacttctggcccagaaggccgcagaggctgagcaggaaatgcagcgcatcaaggccacagcgattcgcacggaggaggagaagcgcctgatggagcagaaggtgctggaagccgaggtgctggcactgaagatggctgaggagtcagagaggagggccaaagaggcagatcagctgaagcaggacctgcaggaagcacgcgaggcggagcgaagagccaagcagaagctcctggagattgccaccaagcccacgtacccgcccatgaacccaattccagcaccgttgcctcctgacataccaagcttcaacctcattggtgacagcctgtctttcgacttcaaagatactgacatgaagcggctttccatggagatagagaaagaaaaagtggaatacatggaaaagagcaagcatctgcaggagcagctcaatgaactcaagacagaaatcgaggccttgaaactgaaagagagggagacagctctggatattctgcacaatgagaactccgacaggggtggcagcagcaagcacaataccattaaaaagctcaccttgcagagcgccaagtcccgagtggccttctttgaagagctctagcaggtgacccagccaccccaggacctgccacttctcctgctaccgggaccgcgggatggaccagatatcaagagagccatccatagggagctggctgggggtttccgtgggagctccagaactttccccagctgagtgaagagcccagcccctcttatgtgcaattgccttgaactacgaccctgtagagatttctctcatggcgttctagttctctgacctgagtctttgttttaagaagtatttgtct

SEQ ID NO: 28825 - DNA, 8684 bp, Homo Sapiens
gagctgccacttttcaccgttagaagtagagctttttccagacctcctaccttttagtctactttgaaaggtgaaagaaagaacatcgtttcaggaataaaaatgcacagtagtagttatagttaccgtagcagtgattctgtgtttagtaacactaccagcactcgaaccagtcttgattcaaatgaaaatcttctcttggttcattgtggtccaacactgatcaactcttgcattagcttcggtagtgaatcctttgatggacacaggttagaaatgttgcaacagattgccaacagagttcagagggacagtgtcatctgtgaagacaaactgattcttgctggaaatgctcttcagtctgattctaaaagattagaatcaggagtgcagtttcagaatgaagcagaaattgctgggtatatacttgaatgtgagaaccttttacgccagcatgtaattgatgtacagattcttattgatggaaaatactaccaggcagatcaattggtacagagggttgcaaaactgcgtgacgaaattatggccttaaggaacgaatgttcttctgtgtacagcaaaggacgcatactgacaacagaacagacaaagctcatgatatcaggaatcactcaaagtttaaactcaggatttgcacagaccttacaccctagtctgacctcagggctgacccagagtttaacaccttccctaacctcttctagtatgacttctggcctgtcatcagggatgacttcccgcctgactccatctgtcactccagcttatacacctggtttcccatcaggattagttccaaatttcagttcaggagtagagccaaattcattgcaaactttgaagttgatgcagatccgaaaaccccttctaaagtcttctttgctggatcaaaatttaacagaagaagaaatcaatatgaaatttgttcaggatcttttgaattgggttgatgagatgcaggtacaactggaccgcactgagtggggctcagatttgccaagtgttgaaagccatttagaaaatcataaaaatgttcatagagctattgaagaatttgaatctagtctcaaagaagctaaaatcagtgagattcaaatgacagcacctcttaaactgacttatgcagaaaagttgcacagattagagagtcagtatgcaaaactcttgaatacatccaggaatcaagaacggcaccttgatacactccataattttgtaagtcgtgcgactaatgaacttatttggttgaatgaaaaagaagaggaggaagttgcttatgactggagtgagagaaacaccaacatagctaggaaaaaagattatcatgctgaattaatgagagaacttgatcaaaaggaagaaaatattaaatcagttcaggagatagcagagcagctacttctagaaaatcatccagcccggttaactattgaggcctacagagcggcaatgcagacgcagtggagctggatcttacagctctgccagtgtgtggagcagcacataaaggagaacacagcgtatttcgagtttttcaatgatgccaaagaagctactgattacttaaggaatctaaaagatgccattcagcggaagtacagctgtgatagatcaagcagcattcacaagctagaagaccttgttcaggaatcaatggaagagaaagaagaacttctgcagtacaaaagcactatagcaaacctaatgggaaaagcaaaaacaataattcaactgaagccaaggaattctgactgtccactcaaaacttctattccgatcaaagctatctgtgactacagacaaattgagataaccatttacaaagacgatgaatgtgttttggcgaataactctcatcgtgctaaatggaaggtcattagtcctactgggaatgaggctatggtcccatctgtgtgcttcaccgttcctccaccaaacaaagaagcggtggaccttgccaacagaattgagcaacagtatcagaatgtcctgactctttggcatgagtctcacataaacatgaagagtgtagtatcctggcattatctcatcaatgaaattgatagaattcgagctagcaatgtggcttcaataaagacaatgctacctggtgaacatcagcaagttctaagtaatctacaatctcgttttgaagattttctggaagatagccaggaatcccaagtcttttcaggctcagatataacacaactggaaaaggaggttaatgtatgtaagcagtattatcaagaacttcttaaatctgcagaaagagaggagcaagaggaatcagtttataatctctacatctctgaagttcgaaacattagacttcggttagagaactgtgaagatcggctgattagacagattcgaactcccctggaaagagatgatttgcatgaaagtgtgttcagaatcacagaacaggagaaactaaagaaagagctggaacgacttaaagatgatttgggaacaatcacaaataagtgtgaggagtttttcagtcaagcagcagcctcttcatcagtccctaccctacgatcagagcttaatgtggtccttcagaacatgaaccaagtctattctatgtcttccacttacatagataagttgaaaactgttaacttggtgttaaaaaacactcaagctgcagaagccctcgtaaaactctatgaaactaaactgtgtgaagaagaagcagttatagctgacaagaataatattgagaatctaataagtactttaaagcaatggagatctgaagtagatgaaaagagacaggtattccatgccttagaggatgagttgcagaaagctaaagccatcagtgatgaaatgtttaaaacgtataaagaacgggaccttgattttgactggcacaaagaaaaagcagatcaattagttgaaaggtggcaaaatgttcatgtgcagattgacaacaggttacgggacttagagggcattggcaaatcactgaagtactacagagacacttaccatcctttagatgattggatccagcaggttgaaactactcagagaaagattcaggaaaatcagcctgaaaatagtaaaaccctagccacacagttgaatcaacagaagatgctggtgtccgaaatagaaatgaaacagagcaaaatggacgagtgtcaaaaatatgcagaacagtactcagctacagtgaaggactatgaattacaaacaatgacctaccgggccatggtagattcacaacaaaaatctccagtgaaacgccgaagaatgcagagttcagcagatctcattattcaagagttcatggacctaaggactcgatatactgccctggtcactctcatgacacaatatattaaatttgctggtgattcattgaagaggctggaagaggaggagattaaaaggtgtaaggagacttctgaacatggggcatattcagatctgcttcagcgtcagaaggcaacagtgcttgagaatagcaaacttacaggaaagataagtgagttggaaagaatggtagctgaactaaagaaacaaaagtcccgagtagaggaagaacttccgaaggtcagggaggctgcagaaaatgaattgagaaagcagcagagaaatgtagaagatatctctctgcagaagataagggctgaaagtgaagccaagcagtaccgcagggaacttgaaaccattgtgagagagaaggaagccgctgaaagagaactggagcgggtgaggcagctcaccatagaggccgaggctaaaagagctgccgtggaagagaacctcctgaattttcgcaatcagttggaggaaaacacctttaccagacgaacactggaagatcatcttaaaagaaaagatttaagtctcaatgatttggagcaacaaaaaaataaattaatggaagaattaagaagaaagagagacaatgaggaagaactcttgaagctgataaagcagatggaaaaagaccttgcatttcagaaacaggtagcagagaaacagttgaaagaaaagcagaaaattgaattggaagcaagaagaaaaataactgaaattcagtatacatgtagagaaaatgcattgccagtgtgtccgatcacacaggctacatcatgcagggcagtaacgggtctccagcaagaacatgacaagcagaaagcagaagaactcaaacagcaggtagatgaactaacagctgccaatagaaaggctgaacaagacatgagagagctgacatatgaacttaatgccctccagcttgaaaaaacgtcatctgaggaaaaggctcgtttgctaaaagataaactagatgaaacaaataatacactcagatgccttaagttggagctggaaaggaaggatcaggcggagaaagggtattctcaacaactcagagagcttggtaggcaattgaatcaaaccacaggtaaagctgaagaagccatgcaagaagctagtgatctcaagaaaataaagcgcaattatcagttagaattagaatctcttaatcatgaaaaagggaaactacaaagagaagtagacagaatcacaagggcacatgctgtagctgagaagaatattcagcatttaaattcacaaattcattcttttcgagatgagaaagaattagaaagactacaaatctgccagagaaaatcagatcatctaaaagaacaatttgagaaaagccatgagcagttgcttcaaaatatcaaagctgaaaaagaaaataatgataaaatccaaaggctcaatgaagaattggagaaaagtaatgagtgtgcagagatgctaaaacaaaaagtagaggagcttactaggcagaataatgaaaccaaattaatgatgcagagaattcaggcagaatcagagaatatagttttagagaaacaaactatccagcaaagatgtgaagcactgaaaattcaggcagatggttttaaagatcagctacgcagcacaaatgaacacttgcataaacagacaaaaacagagcaggattttcaaagaaaaattaaatgcctagaagaagacctggcgaaaagtcaaaatttggtaagtgaatttaagcaaaagtgtgaccaacagaacattatcatccagaataccaagaaagaagttagaaatctgaatgcggaactgaatgcttccaaagaagagaagcgacgcggggagcagaaagttcagctacaacaagctcaggtgcaagagttaaataacaggttgaaaaaagtacaagacgaattacacttaaagaccatagaggagcagatgacccacagaaagatggttctgtttcaggaagaatctggtaaattcaaacaatcagcagaggagtttcggaagaagatggaaaaattaatggagtccaaagtcatcactgaaaatgatatttcaggcattaggcttgactttgtgtctcttcaacaagaaaactctagagcccaagaaaatgctaagctttgtgaaacaaacattaaagaacttgaaagacagcttcaacagtatcgtgaacaaatgcagcaagggcagcacatggaagcaaatcattaccaaaaatgtcagaaacttgaggatgagctgatagcccagaagcgtgaggttgaaaacctgaagcaaaaaatggaccaacagatcaaagagcatgaacatcaattagttttgctccagtgtgaaattcaaaaaaagagcacagccaaagactgtaccttcaaaccagattttgagatgacagtgaaggagtgccagcactctggagagctgtcctctagaaacactggacaccttcacccaacacccagatcccctctgttgagatggactcaagaaccacagccattggaagagaagtggcagcatcgggttgttgaacagatacccaaagaagtccaattccagccaccaggggctccactcgagaaagagaaaagccagcagtgttactctgagtacttttctcagacaagcaccgagttacagataacttttgatgagacaaaccccattacaagactgtctgaaattgagaagataagagaccaagccctgaacaattctagaccacctgttaggtatcaagataacgcatgtgaaatggaactggtgaaggttttgacacccttagagatagctaagaacaagcagtatgatatgcatacagaagtcacaacattaaaacaagaaaagaacccagttcccagtgctgaagaatggatgcttgaagggtgcagagcatctggtggactcaagaaaggggatttccttaagaagggcttagaaccagagaccttccagaactttgatggtgatcatgcatgttcagtcagggatgatgaatttaaattccaagggcttaggcacactgtgactgccaggcagttggtggaagctaagcttctggacatgagaacaattgagcagctgcgactcggtcttaagactgttgaagaagttcagaaaactcttaacaagtttctgacgaaagccacctcaattgcagggctttacctagaatctacaaaagaaaagatttcatttgcctcagcggccgagagaatcataatagacaaaatggtggctttggcatttttagaagctcaggctgcaacaggttttataattgatcccatttcaggtcagacatattctgttgaagatgcagttcttaaaggagttgttgaccccgaattcagaattaggcttcttgaggcagagaaggcagctgtgggatattcttattcttctaagacattgtcagtgtttcaagctatggaaaatagaatgcttgacagacaaaaaggtaaacatatcttggaagcccagattgccagtgggggtgtcattgaccctgtgagaggcattcgtgttcctccagaaattgctctgcagcaggggttgttgaataatgccatcttacagtttttacatgagccatccagcaacacaagagttttccctaatcccaataacaagcaagctctgtattactcagaattactgcgaatgtgtgtatttgatgtagagtcccaatgctttctgtttccatttggggagaggaacatttccaatctcaatgtcaagaaaacacatagaatttctgtagtagatactaaaacaggatcagaattgaccgtgtatgaggctttccagagaaacctgattgagaaaagtatatatcttgaactttcagggcagcaatatcagtggaaggaagctatgttttttgaatcctatgggcattcttctcatatgctgactgatactaaaacaggattacacttcaatattaatgaggctatagagcagggaacaattgacaaagccttggtcaaaaagtatcaggaaggcctcatcacacttacagaacttgctgattctttgctgagccggttagtccccaagaaagatttgcacagtcctgttgcagggtattggctgactgctagtggggaaaggatctctgtactaaaagcctcccgtagaaatttggttgatcggattactgccctccgatgccttgaagcccaagtcagtacagggggcataattgatcctcttactggcaaaaagtaccgggtggccgaagctttgcatagaggcctggttgatgaggggtttgcccagcagctgcgacagtgtgaattagtaatcacagggattggccatcccatcactaacaaaatgatgtcagtggtggaagctgtgaatgcaaatattataaataaggaaatgggaatccgatgtttggaatttcagtacttgacaggagggttgatagagccacaggttcactctcggttatcaatagaagaggctctccaagtaggtattatagatgtcctcattgccacaaaactcaaagatcaaaagtcatatgtcagaaatataatatgccctcagacaaaaagaaagttgacatataaagaagccttagaaaaagctgattttgatttccacacaggacttaaactgttagaagtatctgagcccctgatgacaggaatttctagcctctactattcttcctaatgggacatgtttaaataactgtgcaaggggtgatgcaggctggttcatgccactttttcagagtatgatgatatcggctacatatgcagtctgtgaattatgtaacatactctatttcttgagggctgcaaattgctaagtgctcaaaatagagtaagttttaaattgaaaattacataagatttaatgcccttcaaatggtttcatttagccttgagaatggttttttgaaacttggccacactaaaatgtttttttttttttacgtagaatgtgggataaacttgatgaactccaagttcacagtgtcatttcttcagaactccccttcattgaatagtgatcatttattaaatgataaattgcactcgctgaaagagcacgtcatgaagcaccatggaatcaaagagaaagatataaattcgttcccacagccttcaagctgcagtgttttagattgcttcaaaaaatgaaaaagttttgcctttttcgatatagtgaccttctttgcatattaaaatgtttaccacaatgtcccatttctagttaagtcttcgcacttgaaagctaacattatgaatattatgtgttggaggaggggaaggattttcttcattctgtgtattttccgg

SEQ ID NO: 28826 - DNA, 3567 bp, Homo Sapiens
cgccatcccgcgctctgcggactgggaggcccgggccaggacgcgagtctgcgcagccgaggttccccagcgccccctgcagccgcgcgtaggcagagacggagcccggccctgcgcctccgcaccacgcccgggaccccacccagcggcccgtacccggagaagcagcgcgagcacccgaagctcccggctcggcggcagaaaccgggagtggggccgggcgagtgcgcggcatcccaggccggcccgaacgtccgcccgcggtgggccgacttcccctcctcttccctctctccttcctttagcccgctggcgccggacacgctgcgcctcatctcttggggcgttcttccccgttggccaaccgtcgcatcccgtgcaactttggggtagtggccgcttagtgttgaatgttccccaccgagagcgcatggcttgggaagcgaggcgcgaacccgggccccgaagccgccgtccgggagacggtgatgctgttgctgtgcctgggggtcccgaccggccgcccctacaacgtggacactgagagcgcgctgctttaccagggcccccacaacacgctgttcggctactcggtcgtgctgcacagccacggggcgaaccgatggctcctagtgggtgcgcccactgccaactggctcgccaacgcttcagtgatcaatcccggggcgatttacagatgcaggatcggaaagaatcccggccagacgtgcgaacagctccagctgggtagccctaatggagaaccttgtggaaagacttgtttggaagagagagacaatcagtggttgggggtcacactttccagacagccaggagaaaatggatccatcgtgacttgtgggcatagatggaaaaatatattttacataaagaatgaaaataagctccccactggtggttgctatggagtgccccctgatttacgaacagaactgagtaaaagaatagctccgtgttatcaagattatgtgaaaaaatttggagaaaattttgcatcatgtcaagctggaatatccagtttttacacaaaggatttaattgtgatgggggccccaggatcatcttactggactggctctctttttgtctacaatataactacaaataaatacaaggcttttttagacaaacaaaatcaagtaaaatttggaagttatttaggatattcagtcggagctggtcattttcggagccagcatactaccgaagtagtcggaggagctcctcaacatgagcagattggtaaggcatatatattcagcattgatgaaaaagaactaaatatcttacatgaaatgaaaggtaaaaagcttggatcgtactttggagcttctgtctgtgctgtggacctcaatgcagatggcttctcagatctgctcgtgggagcacccatgcagagcaccatcagagaggaaggaagagtgtttgtgtacatcaactctggctcgggagcagtaatgaatgcaatggaaacaaacctcgttggaagtgacaaatatgctgcaagatttggggaatctatagttaatcttggcgacattgacaatgatggctttgaagatgttgctatcggagctccacaagaagatgacttgcaaggtgctatttatatttacaatggccgtgcagatgggatctcgtcaaccttctcacagagaattgaaggacttcagatcagcaaatcgttaagtatgtttggacagtctatatcaggacaaattgatgcagataataatggctatgtagatgtagcagttggtgcttttcggtctgattctgctgtcttgctaaggacaagacctgtagtaattgttgacgcttctttaagccaccctgagtcagtaaatagaacgaaatttgactgtgttgaaaatggatggccttctgtgtgcatagatctaacactttgtttctcatataagggcaaggaagttccaggttacattgttttgttttataacatgagtttggatgtgaacagaaaggcagagtctccaccaagattctatttctcttctaatggaacttctgacgtgattacaggaagcatacaggtgtccagcagagaagctaactgtagaacacatcaagcatttatgcggaaagatgtgcgggacatcctcaccccaattcagattgaagctgcttaccaccttggtcctcatgtcatcagtaaacgaagtacagaggaattcccaccacttcagccaattcttcagcagaagaaagaaaaagacataatgaaaaaaacaataaactttgcaaggttttgtgcccatgaaaattgttctgctgatttacaggtttctgcaaagattgggtttttgaagccccatgaaaataaaacatatcttgctgttgggagtatgaagacattgatgttgaatgtgtccttgtttaatgctggagatgatgcatatgaaacgactctacatgtcaaactacccgtgggtctttatttcattaagattttagagctggaagagaagcaaataaactgtgaagtcacagataactctggcgtggtacaacttgactgcagtattggctatatatatgtagatcatctctcaaggatagatattagctttctcctggatgtgagctcactcagcagagcggaagaggacctcagtatcacagtgcatgctacctgtgaaaatgaagaggaaatggacaatctaaagcacagcagagtgactgtagcaatacctttaaaatatgaggttaagctgactgttcatgggtttgtaaacccaacttcatttgtgtatggatcaaatgatgaaaatgagcctgaaacgtgcatggtggagaaaatgaacttaactttccatgttatcaacactggcaatagtatggctcccaatgttagtgtggaaataatggtaccaaattcttttagcccccaaactgataagctgttcaacattttggatgtccagactactactggagaatgccactttgaaaattatcaaagagtgtgtgcattagagcagcaaaagagtgcaatgcagaccttgaaaggcatagtccagttcttgtccaagactgataagaggctattgtactgcataaaagctgatccacattgtttaaatttcttgtgtaattttgggaaaatggaaagtggaaaagaagccagtgttcatatccaactggaaggccggccatccattttagaaatggatgagacttcagcactcaagtttgaaataagagcaacaggttttccagagccaaatccaagagtaattgaactaaacaaggatgagaatgttgcgcatgttctactggaaggactacatcatcaaagacccaaacgttatttcaccatagtgattatttcaagtagcttgctacttggacttattgtacttctgttgatctcatatgttatgtggaaggctggcttctttaaaagacaatacaaatctatcctacaagaagaaaacagaagagacagttggagttatatcaacagtaaaagcaatgatgattaaggacttctttcaaattgagagaatggaaaacagcccgccc

SEQ ID NO: 28827 - DNA, 3979 bp, Homo Sapiens
ggcggccgcggcagggcgggcgccgcgcggaggcagggcgggcgtattcaatggaagtgtgttaccagctgccggtactgcccctggacaggccggtcccccagcacgtcctcagccgccgaggagccatcagcttcagctccagctccgctctcttcggctgccccaatccccggcagctctctcagaggcgtggagctatttcctatgacagttctgatcagactgcattatacattcgtatgctaggagatgtacgtgtaaggagccgagcaggatttgaatcagaaagaagaggttctcacccatatattgattttcgtattttccactctcaatctgaaattgaagtgtctgtctctgcaaggaatatcagaaggctactaagtttccagcgatatcttagatcttcacgcttttttcgtggtactgcggtttcaaattccctaaacattttagatgatgattataatggacaagccaagtgtatgctggaaaaagttggaaattggaattttgatatctttctatttgatagactaacaaatggaaatagtctagtaagcttaacctttcatttatttagtcttcatggattaattgagtacttccatttagatatgatgaaacttcgtagatttttagttatgattcaagaagattaccacagtcaaaatccttaccataacgcagtccacgctgcggatgttactcaggccatgcactgttacttaaaggaacctaagcttgccaattctgtaactccttgggatatcttgctgagcttaattgcagctgccactcatgatctggatcatccaggtgttaatcaacctttccttattaaaactaaccattacttggcaactttatacaagaatacctcagtactggaaaatcaccactggagatctgcagtgggcttattgagagaatcaggcttattctcacatctgccattagaaagcaggcaacaaatggagacacagataggtgctctgatactagccacagacatcagtcgccagaatgagtatctgtctttgtttaggtcccatttggatagaggtgatttatgcctagaagacaccagacacagacatttggttttacagatggctttgaaatgtgctgatatttgtaacccatgtcggacgtgggaattaagcaagcagtggagtgaaaaagtaacggaggaattcttccatcaaggagatatagaaaaaaaatatcatttgggtgtgagtccactttgcgatcgtcacactgaatctattgccaacatccagattggttttatgacttacctagtggagcctttatttacagaatgggccaggttttccaatacaaggctatcccagacaatgcttggacacgtggggctgaataaagccagctggaagggactgcagagagaacagtcgagcagtgaggacactgatgctgcatttgagttgaactcacagttattacctcaggaaaatcggttatcataacccccagaaccagtgggacaaactgcctcctggaggtttttagaaatgtgaaatggggtcttgaggtgagagaacttaactcttgactgccaaggtttccaagtgagtgatgccagccagcattatttatttccaagatttcctctgttggatcatttgaacccacttgttaattgcaagacccgaacatacagcaatatgaatttggctttcatgtgaaaccttgaatataaagcccagcaggagagaatccgaaaggagtaacaaaggaagttttgatatgtgccacgactttttcaaagcatctaatcttcaaaacgtcaaacttgaattgttcagcaacaatctcttggaatttaaccagtctgatgcaacaatgtgtatcttgtaccttccactaagttctctctgagaaaatggaaatgtgaagtgcccagcctctgctgcctctggcaagacaatgtttacaaatcaactctgaaaatattggttctaaattgccttggagcatgattgtgaaggaaccactcaaacaaatttaaagatcaaactttagactgcagctctttccccctggtttgcctttttcttctttggatgccaccaaagcctcccatttgctatagttttatttcatgcactggaaactgagcatttatcgtagagtaccgccaagctttcactccagtgccgtttggcaatgcaattttttttagcaattagtttttaatttggggtgggaggggaagaacaccaatgtcctagctgtattatgattctgcactcaagacattgcatgttgttttcactactgtacacttgacctgcacatgcgagaaaaaggtggaatgtttaaaacaccataatcagctcaggtatttgccaatctgaaataaaagtgggatgggagagcgtgtccttcagatcaagggtactaaagtccctttcgctgcagtgagtgagaggtatgttgtgtgtgaatgtacggatgtgtgtttggtgatgtttgtgcatgtgtgacgtgcatgttatgtttctccatgtgggcaaagatttgaaagtaagcttttatttattattttagaatgtgacataatgagcagccacactcgggggaggggaaggttggtaggtaagctgtaacagattgctccagttgccttaaactatgcacatagctaagtgaccaaacttcttgttttgatttgaaaaaagtgcattgttttcttgtccctccctttgatgaaacgttaccctttgacgggccttttgatgtgaacagatgttttctaggacaaactataaggactaattttaaacttcaaacattccacttttgtaatttgttttaaattgttttatgtatagtaagcacaactgtaatctagttttaagagaaaccggtgctttcttttagttcatttgtatttcccttgttactgtaaaagactgtttattaattgtttacagtttgttgcaacagccattttcttgggagaaagcttgagtgtaaagccatttgtaaaaggctttgccatactcattttaatatgtgcctgttgctgttaacttttgatgaataaaaacctatcttttcatgaaacttctctctatacaaattgaaatacataatgctttctggttcttcttcaaaccaaaacttgtcaaattcatagacaagataacagtaaaactgatgaaagtgttccattgttggtataccaggaacaaggttatagagatgaaacttcaaagcttcactcttcagtaagctataagccatctctgtaagattgattccaactattgcataagaataccctaattttggatgatttgaacgggaaagaatctgatgagcttcactagtgtaattttcactgaaatacacaagattgattaacccaagtatgcccatgcctctgaagtctgtcttgggatcatcaccctgaaaaccaatttcagcccactgcttggagattctagcgtttaacttcttcgtgggcattagaagattccaaagcttcatgagtagctcttcatgctgtaggttatcagaatcatatggccttttcctcacactttctacatccaaatacagctgtttataaccagttatctgcagtaagcacatcttcatgcatattttaaaactggcatccttctcagggttaatattcttttccttcataatatcatctacatatttgtccacttcactctgaacaacatgtgtcgccttctgtaaaaccttattcttggagtatgtcaaggaattttctatcctgtgtgtcctttgtgcacctacataggtatcaaatattcgctgcaattcacacttcccagtcatctgtcgtaatagccatttcatccaaaatcgaaaaaagtgcccatagaagaactcccacaaagaaataaacatttttttttcctcacaggagcggaagaactagggggagcaggagctgcaatgcggccgc

SEQ ID NO: 28828 - DNA, 10348 bp, Homo Sapiens
ttgctgtgtgaggcagaacctgcgggggcaggggcgggctggttccctggccagccattggcagagtccgcaggctagggctgtcaatcatgctggccggcgtggccccgcctccgccggcgcggccccgcctccgccggcgcacgtctgggacgcaaggcgccgtgggggctgccgggacgggtccaagatggacggccgctcaggttctgcttttacctgcggcccagagccccattcattgccccggtgctgagcggcgccgcgagtcggcccgaggcctccggggactgccgtgccgggcgggagaccgccatggcgaccctggaaaagctgatgaaggccttcgagtccctcaagtccttccagcagcagcagcagcagcagcagcagcagcagcagcagcagcagcagcagcagcagcagcagcaacagccgccaccgccgccgccgccgccgccgcctcctcagcttcctcagccgccgccgcaggcacagccgctgctgcctcagccgcagccgcccccgccgccgcccccgccgccacccggcccggctgtggctgaggagccgctgcaccgaccaaagaaagaactttcagctaccaagaaagaccgtgtgaatcattgtctgacaatatgtgaaaacatagtggcacagtctgtcagaaattctccagaatttcagaaacttctgggcatcgctatggaactttttctgctgtgcagtgatgacgcagagtcagatgtcaggatggtggctgacgaatgcctcaacaaagttatcaaagctttgatggattctaatcttccaaggttacagctcgagctctataaggaaattaaaaagaatggtgcccctcggagtttgcgtgctgccctgtggaggtttgctgagctggctcacctggttcggcctcagaaatgcaggccttacctggtgaaccttctgccgtgcctgactcgaacaagcaagagacccgaagaatcagtccaggagaccttggctgcagctgttcccaaaattatggcttcttttggcaattttgcaaatgacaatgaaattaaggttttgttaaaggccttcatagcgaacctgaagtcaagctcccccaccattcggcggacagcggctggatcagcagtgagcatctgccagcactcaagaaggacacaatatttctatagttggctactaaatgtgctcttaggcttactcgttcctgtcgaggatgaacactccactctgctgattcttggcgtgctgctcaccctgaggtatttggtgcccttgctgcagcagcaggtcaaggacacaagcctgaaaggcagcttcggagtgacaaggaaagaaatggaagtctctccttctgcagagcagcttgtccaggtttatgaactgacgttacatcatacacagcaccaagaccacaatgttgtgaccggagccctggagctgttgcagcagctcttcagaacgcctccacccgagcttctgcaaaccctgaccgcagtcgggggcattgggcagctcaccgctgctaaggaggagtctggtggccgaagccgtagtgggagtattgtggaacttatagctggagggggttcctcatgcagccctgtcctttcaagaaaacaaaaaggcaaagtgctcttaggagaagaagaagccttggaggatgactctgaatcgagatcggatgtcagcagctctgccttaacagcctcagtgaaggatgagatcagtggagagctggctgcttcttcaggggtttccactccagggtcagcaggtcatgacatcatcacagaacagccacggtcacagcacacactgcaggcggactcagtggatctggccagctgtgacttgacaagctctgccactgatggggatgaggaggatatcttgagccacagctccagccaggtcagcgccgtcccatctgaccctgccatggacctgaatgatgggacccaggcctcgtcgcccatcagcgacagctcccagaccaccaccgaagggcctgattcagctgttaccccttcagacagttctgaaattgtgttagacggtaccgacaaccagtatttgggcctgcagattggacagccccaggatgaagatgaggaagccacaggtattcttcctgatgaagcctcggaggccttcaggaactcttccatggcccttcaacaggcacatttattgaaaaacatgagtcactgcaggcagccttctgacagcagtgttgataaatttgtgttgagagatgaagctactgaaccgggtgatcaagaaaacaagccttgccgcatcaaaggtgacattggacagtccactgatgatgactctgcacctcttgtccattgtgtccgccttttatctgcttcgtttttgctaacagggggaaaaaatgtgctggttccggacagggatgtgagggtcagcgtgaaggccctggccctcagctgtgtgggagcagctgtggccctccacccggaatctttcttcagcaaactctataaagttcctcttgacaccacggaataccctgaggaacagtatgtctcagacatcttgaactacatcgatcatggagacccacaggttcgaggagccactgccattctctgtgggaccctcatctgctccatcctcagcaggtcccgcttccacgtgggagattggatgggcaccattagaaccctcacaggaaatacattttctttggcggattgcattcctttgctgcggaaaacactgaaggatgagtcttctgttacttgcaagttagcttgtacagctgtgaggaactgtgtcatgagtctctgcagcagcagctacagtgagttaggactgcagctgatcatcgatgtgctgactctgaggaacagttcctattggctggtgaggacagagcttctggaaacccttgcagagattgacttcaggctggtgagctttttggaggcaaaagcagaaaacttacacagaggggctcatcattatacagggcttttaaaactgcaagaacgagtgctcaataatgttgtcatccatttgcttggagatgaagaccccagggtgcgacatgttgccgcagcatcactaattaggcttgtcccaaagctgttttataaatgtgaccaaggacaagctgatccagtagtggccgtggcaagagatcaaagcagtgtttacctgaaacttctcatgcatgagacgcagcctccatctcatttctccgtcagcacaataaccagaatatatagaggctataacctactaccaagcataacagacgtcactatggaaaataacctttcaagagttattgcagcagtttctcatgaactaatcacatcaaccaccagagcactcacatttggatgctgtgaagctttgtgtcttctttccactgccttcccagtttgcatttggagtttaggttggcactgtggagtgcctccactgagtgcctcagatgagtctaggaagagctgtaccgttgggatggccacaatgattctgaccctgctctcgtcagcttggttcccattggatctctcagcccatcaagatgctttgattttggccggaaacttgcttgcagccagtgctcccaaatctctgagaagttcatgggcctctgaagaagaagccaacccagcagccaccaagcaagaggaggtctggccagccctgggggaccgggccctggtgcccatggtggagcagctcttctctcacctgctgaaggtgattaacatttgtgcccacgtcctggatgacgtggctcctggacccgcaataaaggcagccttgccttctctaacaaaccccccttctctaagtcccatccgacgaaaggggaaggagaaagaaccaggagaacaagcatctgtaccgttgagtcccaagaaaggcagtgaggccagtgcagcttctagacaatctgatacctcaggtcctgttacaacaagtaaatcctcatcactggggagtttctatcatcttccttcatacctcaaactgcatgatgtcctgaaagctacacacgctaactacaaggtcacgctggatcttcagaacagcacggaaaagtttggagggtttctccgctcagccttggatgttctttctcagatactagagctggccacactgcaggacattgggaagtgtgttgaagagatcctaggatacctgaaatcctgctttagtcgagaaccaatgatggcaactgtttgtgttcaacaattgttgaagactctctttggcacaaacttggcctcccagtttgatggcttatcttccaaccccagcaagtcacaaggccgagcacagcgccttggctcctccagtgtgaggccaggcttgtaccactactgcttcatggccccgtacacccacttcacccaggccctcgctgacgccagcctgaggaacatggtgcaggcggagcaggagaacgacacctcgggatggtttgatgtcctccagaaagtgtctacccagttgaagacaaacctcacgagtgtcacaaagaaccgtgcagataagaatgctattcataatcacattcgtttgtttgaacctcttgttataaaagctttaaaacagtacacgactacaacatgtgtgcagttacagaagcaggttttagatttgctggcgcagctggttcagttacgggttaattactgtcttctggattcagatcaggtgtttattggctttgtattgaaacagtttgaatacattgaagtgggccagttcagggaatcagaggcaatcattccaaacatctttttcttcttggtattactatcttatgaacgctatcattcaaaacagatcattggaattcctaaaatcattcagctctgtgatggcatcatggccagtggaaggaaggctgtgacacatgccataccggctctgcagcccatagtccacgacctctttgtattaagaggaacaaataaagctgatgcaggaaaagagcttgaaacccaaaaagaggtggtggtgtcaatgttactgagactcatccagtaccatcaggtgttggagatgttcattcttgtcctgcagcagtgccacaaggagaatgaagacaagtggaagcgactgtctcgacagatagctgacatcatcctcccaatgttagccaaacagcagatgcacattgactctcatgaagcccttggagtgttaaatacattatttgagattttggccccttcctccctccgtccggtagacatgcttttacggagtatgttcgtcactccaaacacaatggcgtccgtgagcactgttcaactgtggatatcgggaattctggccattttgagggttctgatttcccagtcaactgaagatattgttctttctcgtattcaggagctctccttctctccgtatttaatctcctgtacagtaattaataggttaagagatggggacagtacttcaacgctagaagaacacagtgaagggaaacaaataaagaatttgccagaagaaacattttcaaggtttctattacaactggttggtattcttttagaagacattgttacaaaacagctgaaggtggaaatgagtgagcagcaacatactttctattgccaggaactaggcacactgctaatgtgtctgatccacatcttcaagtctggaatgttccggagaatcacagcagctgccactaggctgttccgcagtgatggctgtggcggcagtttctacaccctggacagcttgaacttgcgggctcgttccatgatcaccacccacccggccctggtgctgctctggtgtcagatactgctgcttgtcaaccacaccgactaccgctggtgggcagaagtgcagcagaccccgaaaagacacagtctgtccagcacaaagttacttagtccccagatgtctggagaagaggaggattctgacttggcagccaaacttggaatgtgcaatagagaaatagtacgaagaggggctctcattctcttctgtgattatgtctgtcagaacctccatgactccgagcacttaacgtggctcattgtaaatcacattcaagatctgatcagcctttcccacgagcctccagtacaggacttcatcagtgccgttcatcggaactctgctgccagcggcctgttcatccaggcaattcagtctcgttgtgaaaacctttcaactccaaccatgctgaagaaaactcttcagtgcttggaggggatccatctcagccagtcgggagctgtgctcacgctgtatgtggacaggcttctgtgcacccctttccgtgtgctggctcgcatggtcgacatccttgcttgtcgccgggtagaaatgcttctggctgcaaatttacagagcagcatggcccagttgccaatggaagaactcaacagaatccaggaataccttcagagcagcgggctcgctcagagacaccaaaggctctattccctgctggacaggtttcgtctctccaccatgcaagactcacttagtccctctcctccagtctcttcccacccgctggacggggatgggcacgtgtcactggaaacagtgagtccggacaaagactggtacgttcatcttgtcaaatcccagtgttggaccaggtcagattctgcactgctggaaggtgcagagctggtgaatcggattcctgctgaagatatgaatgccttcatgatgaactcggagttcaacctaagcctgctagctccatgcttaagcctagggatgagtgaaatttctggtggccagaagagtgccctttttgaagcagcccgtgaggtgactctggcccgtgtgagcggcaccgtgcagcagctccctgctgtccatcatgtcttccagcccgagctgcctgcagagccggcggcctactggagcaagttgaatgatctgtttggggatgctgcactgtatcagtccctgcccactctggcccgggccctggcacagtacctggtggtggtctccaaactgcccagtcatttgcaccttcctcctgagaaagagaaggacattgtgaaattcgtggtggcaacccttgaggccctgtcctggcatttgatccatgagcagatcccgctgagtctggatctccaggcagggctggactgctgctgcctggccctgcagctgcctggcctctggagcgtggtctcctccacagagtttgtgacccacgcctgctccctcatctactgtgtgcacttcatcctggaggccgttgcagtgcagcctggagagcagcttcttagtccagaaagaaggacaaataccccaaaagccatcagcgaggaggaggaggaagtagatccaaacacacagaatcctaagtatatcactgcagcctgtgagatggtggcagaaatggtggagtctctgcagtcggtgttggccttgggtcataaaaggaatagcggcgtgccggcgtttctcacgccattgctcaggaacatcatcatcagcctggcccgcctgccccttgtcaacagctacacacgtgtgcccccactggtgtggaagcttggatggtcacccaaaccgggaggggattttggcacagcattccctgagatccccgtggagttcctccaggaaaaggaagtctttaaggagttcatctaccgcatcaacacactaggctggaccagtcgtactcagtttgaagaaacttgggccaccctccttggtgtcctggtgacgcagcccctcgtgatggagcaggaggagagcccaccagaagaagacacagagaggacccagatcaacgtcctggccgtgcaggccatcacctcactggtgctcagtgcaatgactgtgcctgtggccggcaacccagctgtaagctgcttggagcagcagccccggaacaagcctctgaaagctctcgacaccaggtttgggaggaagctgagcattatcagagggattgtggagcaagagattcaagcaatggtttcaaagagagagaatattgccacccatcatttatatcaggcatgggatcctgtcccttctctgtctccggctactacaggtgccctcatcagccacgagaagctgctgctacagatcaaccccgagcgggagctggggagcatgagctacaaactcggccaggtgtccatacactccgtgtggctggggaacagcatcacacccctgagggaggaggaatgggacgaggaagaggaggaggaggccgacgcccctgcaccttcgtcaccacccacgtctccagtcaactccaggaaacaccgggctggagttgacatccactcctgttcgcagtttttgcttgagttgtacagccgctggatcctgccgtccagctcagccaggaggaccccggccatcctgatcagtgaggtggtcagatcccttctagtggtctcagacttgttcaccgagcgcaaccagtttgagctgatgtatgtgacgctgacagaactgcgaagggtgcacccttcagaagacgagatcctcgctcagtacctggtgcctgccacctgcaaggcagctgccgtccttgggatggacaaggccgtggcggagcctgtcagccgcctgctggagagcacgctcaggagcagccacctgcccagcagggttggagccctgcacggcgtcctctatgtgctggagtgcgacctgctggacgacactgccaagcagctcatcccggtcatcagcgactatctcctctccaacctgaaagggatcgcccactgcgtgaacattcacagccagcagcacgtactggtcatgtgtgccactgcgttttacctcattgagaactatcctctggacgtagggccggaattttcagcatcaataatacagatgtgtggggtgatgctgtctggaagtgaggagtccaccccctccatcatttaccactgtgccctcagaggcctggagcgcctcctgctctctgagcagctctcccgcctggatgcagaatcgctggtcaagctgagtgtggacagagtgaacgtgcacagcccgcaccgggccatggcggctctgggcctgatgctcacctgcatgtacacaggaaaggagaaagtcagtccgggtagaacttcagaccctaatcctgcagcccccgacagcgagtcagtgattgttgctatggagcgggtatctgttctttttgataggatcaggaaaggctttccttgtgaagccagagtggtggccaggatcctgccccagtttctagacgacttcttcccaccccaggacatcatgaacaaagtcatcggagagtttctgtccaaccagcagccatacccccagttcatggccaccgtggtgtataaggtgtttcagactctgcacagcaccgggcagtcgtccatggtccgggactgggtcatgctgtccctctccaacttcacgcagagggccccggtcgccatggccacgtggagcctctcctgcttctttgtcagcgcgtccaccagcccgtgggtcgcggcgatcctcccacatgtcatcagcaggatgggcaagctggagcaggtggacgtgaaccttttctgcctggtcgccacagacttctacagacaccagatagaggaggagctcgaccgcagggccttccagtctgtgcttgaggtggttgcagccccaggaagcccatatcaccggctgctgacttgtttacgaaatgtccacaaggtcaccacctgctgagcgccatggtgggagagactgtgaggcggcagctggggccggagcctttggaagtctgtgcccttgtgccctgcctccaccgagccagcttggtccctatgggcttccgcacatgccgcgggcggccaggcaacgtgcgtgtctctgccatgtggcagaagtgctctttgtggcagtggccaggcagggagtgtctgcagtcctggtggggctgagcctgaggccttccagaaagcaggagcagctgtgctgcaccccatgtgggtgaccaggtcctttctcctgatagtcacctgctggttgttgccaggttgcagctgctcttgcatctgggccagaagtcctccctcctgcaggctggctgttggcccctctgctgtcctgcagtagaaggtgccgtgagcaggctttgggaacactggcctgggtctccctggtggggtgtgcatgccacgccccgtgtctggatgcacagatgccatggcctgtgctgggccagtggctgggggtgctagacacccggcaccattctcccttctctcttttcttctcaggatttaaaatttaattatatcagtaaagagattaattttaacgt

SEQ ID NO: 28829 - DNA, 6110 bp, Homo Sapiens
acctctcagcttccttcaagttcttgtgttctgtgaccccttttcctcatctctgcctgcttcctcacagcttgaggcagccctaggtgaggccaagaagcaacttcaggatgagatgctgcggcgggtggatgctgagaacaggctgcagaccatgaaggaggaactggacttccagaagaacatctacagtgaggtggggactgtgctttgcaagccagagggctggggctgggtgatgacagacttgggctgggctagggggggccagctgtgtcagagctcgccttcctgagtcccttgccctagtggacagggagttgggggtggccagcactcagctcccaggttaaaggggggctggtagtggctcatggagtagggctgggcagggagccccgtccctgggtcttggcctcccaggaactaattctgattttggtttctgtgtccttcctccaacccttccaggagctgcgtgagaccaagcgccgtcatgagacccgactggtggagattgacaatgggaagcagcgtgagtttgagagccggctggcggatgcgctgcaggaactgcgggcccagcatgaggaccaggtggagcagtataagaaggagctggagaagacttattctgccaaggtgcttgctctcgattggttccctcactgcctctgcccttggcagccctacccttacccacgctgggctatgccttctggggatcaggcagatggtggcagggagctcagggtggcccaggacctggggctgtagcagtgatgcccaactcaggcctgtgcctccacccctcccagtcacggcagtgctgaccctttgtcctcccctccagctggacaatgccaggcagtctgctgagaggaacagcaacctggtgggggctgcccacgaggagctgcagcagtcgcgcatccgcatcgacagcctctctgcccagctcagccagctccagaagcaggtgataccccacctcacccctctctccaggggcctagagtctgggccggatgcaggctggaacgcagggttgggggtgggggtggtggtgggaggttcctgaggaggagagggatgaaaagtgtcccacaaccacagagaaggtcgcaggatgtgatgcagatggcctgtgtgctgtttctgtacactcttacctcaccttcacttctcagggctttggttttcccattcgaaaatggaggctgttcttaatctccctaactcagagttgccacaggactccaattgtgagttgttaaaagcatcagtatttttcaaggttgcctgtgcaatttgtgacaggagaaaaagtctaccctcagaccgagaggtttcagttagacaaggggaaggacttcccagttgccagccaagactatgtttagagcttgtgatgttcagagctggctctgatgagggctctggggaagctctgattgcagatcctggagagagtagccagctgtctcctacaccgacccacgtccctccttccccatacttagggcccttgggagctcaccaaaccctcccaccccccttcagctggcagccaaggaggcgaagcttcgagacctggaggactcactggcccgtgagcgggacaccagccggcggctgctggcggaaaaggagcgggagatggccgagatgcgggcaaggatgcagcagcagctggacgagtaccaggagcttctggacatcaagctggccctggacatggagatccacgcctaccgcaagctcttggagggcgaggaggagaggtgggctggggagacgtcgccgaggtgctggcagtgtcctctggcccggcaactggccttgactagacccccacttggtctccctctccccaggctacgcctgtcccccagccctacctcgcagcgcagccgtggccgtgcttcctctcactcatcccagacacagggtgggggcagcgtcaccaaaaagcgcaaactggagtccactgagagccgcagcagcttctcacagcacgcacgcactagcgggcgcgtggccgtggaggaggtggatgaggagggcaagtttgtccggctgcgcaacaagtccaatgaggtaggctcctgctcagggtctaaggggatacagctgcatcagggagagagtggcaagacagaaggatggcatgtggagagaggaacatccttgccctcagagggtggaccagggtgagcctgtatatctcctccacactctggttccaggcctggctcctggactctttggctgcgcacaccttgagcaggttatttaacctctcagagcatcagtttcctcatctgtaaaatggggatgaatactgatccctaagtctttgagttgtcaggaagatgaaagataaggtatccgtgtgcctggtgctgcgtatgtgtccacagatcatggctattatccccgggggaagggcagtgacaggggtgtgtgtagatggaaggagaggcctcaattgcaggcaggcagagggctgggcctttgagcaagatacacccaagagcctgggtgagcctccccgaccttcctcttccctatcttcccggcaggaccagtccatgggcaattggcagatcaagcgccagaatggagatgatcccttgctgacttaccggttcccaccaaagttcaccctgaaggctgggcaggtggtgacggtgagtgtcagggcgcttgggactctggggagaccttgggtgtcgatgggagcgctggggtaagtgtccttttctcctctccagatctgggctgcaggagctggggccacccacagcccccctaccgacctggtgtggaaggcacagaacacctggggctgcgggaacagcctgcgtacggctctcatcaactccactggggaagtaagtaggcctgggcctggctgcttgctggacgaggctccccctgatggccaacatcggaggcagctgcccccaacccaagtttggcaattcagggcccctttctagagctctctgttggaggctccagacttctccacccagcaggaaaccaaaagatgcttcctcaacagtacaaggggcgtgaagttagacagcgaggattgttaaaggcagagccatactcctacccggagagcttgacagtgtccctctggggtggaaatgagttccttagctccatcaccacagaggacagagtaagcagcaggccggacaaagggcaggccacaagaaaagttgcaggtggtcactggggtagagatcttgtacaacccttccctggccctgacccttggacctggttccatgtccccaccaggaagtggccatgcgcaagctggtgcgctcagtgactgtggttgaggacgacgagcatcaggatggagatgacctgctccatcaccaccacgtgagtggtagccgccgctgaggccgagcctgcactggggccaccagccaggcctgggggcagcctctccccagcctccccgtgacaaaaatcttttcattaaagaatgttttggaactttactcgctggcctggcctttcttctctctcctccctataccttgaacagggaacccaggtgtctgggtgccctactctggtaaggaagggagtgggaactttctgatgccatggaatattcctgtgggagcagtggacaagggtctggacttgtcttctgggaaagggaggggaggacagacgtggggcatgcccgccctgcctctctcccccattcttgttgcatgcatatcctctcatttccctcatttttcctgcaagaatgttctctctcattcctgaccgcccctccactccaattaatagtacatgcctgctggcctacaagcttgctcccgttctctcttcttttcctcttaagctcagagtagctagaacagagtcagagtcactgctctggttctctgtccccaagtcttcctgagccttctccccttttatgtcttccctctcctcctccgggcccctagcctcccaaacccccattgcccgctggctccttgggcacagaaccacaccttcctccctggcggctgggagcctgcaggagcctggagcctggttgggcctgagtggtcagtcccagactcgccgtcccgcctgagccttgtctcccttcccagggctcccactgcagcagctcgggggaccccgctgagtacaacctgcgctcgcgcaccgtgctgtgcgggacctgcgggcagcctgccgacaaggcatctgccagcggctcaggagcccaggtgggcggacccatctcctctggctcttctgcctccagtgtcacggtcactcgcagctaccgcagtgtggggggcagtgggggtggcagcttcggggacaatctggtcacccgctcctacctcctgggcaactccagcccccgaacccaggtgagttgtcttctgctttgtcttccaaatcctgcaggcgggtccctggtcatcgaggggtaggacgaggtggccttgcaggggggagagcctgccttctcttccgcagcccgggggagtgggagcctcctccccacagcctgagtcctagacagcccacctctttatcctgcccctcttgtctgagccccagactggagggcaggggcagggctggagtgtgagggatgggggagatgctacctcccttctaggggccaggggagggagggtctggctccaggcccctgttgttcacacctctctcctctgttttctctcttagagcccccagaactgcagcatcatgtaatctgggacctgccaggcaggggtgggggtggaggcttcctgcgtcctcctcacctcatgcccaccccctgccctgcacgtcatgggagggggcttgaagccaaagaaaaataaccctttggtttttttcttctgtatttgtttttctaagagaagttattttctacagtggttttatactgaaggaaaaacacaagcaaaaaaaaaaaaaaagcatctatctcatctatctcaatcctaatttctcctcccttccttttccctgcttccaggaaactccacatctgccttaaaaccaaagagggcttcctctagaagccaagggaaaggggtgcttttatagaggctagcttctgcttttctgccctggctgctgccccaccccggggaccctgtgacatggtgcctgagaggcaggcatagaggcttctccgccagcctcctctggacggcaggctcactgccaggccagcctccgagagggagagagagagagagaggacagcttgagccgggcccctggcttggcctgctgtgattccactacacctggctgaggttcctctgcctgccccgcccccagtccccacccctgcccccagccccggggtgagtccattctcccaggtaccagctgcgcttgcttttctgtattttatttagacaagagatgggaatgaggtgggaggtggaagaagggagaagaaaggtgagtttgagctgccttccctagctttagaccctgggtgggctctgtgcagtcactggaggttgaagccaagtggggtgctgggaggagggagagggaggtcactggaaaggggagagcctgctgcacccaccgtggaggaggaaggcaagagggggtggaggggtgtggcagttggttttggcaaacgcttaaagagcccttgcctccccatttcccatctgcaccccttctctcctccccaaatcaatacactagttgtttctacccctggctgctgtggtgtctttgttggtggacgtcgctgtgtgtactgaggtgcagactcgtgggcatgtgcgcgcgtacacacacacacacacacacacacacacacacacacacacacacacacacacacacacacacacacagcgccgcacggtcactgcatcctcctgctcattgctgcccagccctgccctgctccaggggaaacaattagagatcagagcactttgggtgcacatctgggcactcggtggtggctgagggggaaggctttggatattaaccatcaaccacccactgtaacggttctctcccaacgggaagtccttccagaggaaggcagcaacctgaagggaggg

SEQ ID NO: 28830 - DNA, 3254 bp, Homo Sapiens
ggggaggaaacgagctggagcagcatctcatctaccctccttgacacctccccgtggctccagcaagccctagaggtcagccttgcggaccaacaggaggactcccagctttcccttttcaagaggtaccccagacaccggccaccctcttccagcccctgcggccagtgcaaggaggcaccaatgctctgaggctgtcgcgtggtgcagcgtcgagcatcctcgccgagtccttctgctgcctgtcccgcctcaccccgctccatcacaccagctggccctctttgcttccttttcccagaatcgttaagccccgactcccactagcacctcgtaccaacctcgccccaccccatcctcctgccttcccgcgctccggtgtcccccgctgccatgagctcccccatcagcaagagccgctcgcttgccgccttcctgcagcagctgcgcagtccgaggcagcccccgagactggtgacatctacggcgtacacgtcccctcagccgcgagaggtgccagtctgcccgctgacagctggtggcgagactcagaacgcggccgccctgccgggccccaccagctggccactgctggcgagcctgctgcagattctctggaaagggggtctcaagaaacagcacgacaccctggtggagtaccacaagaagtatggcaagattttccgcatgaagttgggttcctttgagtcggtgcacctgggctcgccatgcctgctggaagcgctgtaccgcaccgagagcgtaccccagcggctggagatcaaaccgtggaaggcctatcgcgactaccgcaaagaaggctacgggctgctgatcctggaaggggaagactggcagcgggtccggagtgcctttcaaaagaaactaatgaaaccaggggaagtgatgaagctggacaacaaaatcaatgaggtcttggccgattttatgggcagaatagatgagctctgtgatgaaagaggccacgtcgaagacttgtacagcgaactgaacaaatggtcgtttgaaagtatctgcctcgtgttgtatgagaagagatttgggcttctccagaagaatgcaggggatgaagctgtgaacttcatcatggccatcaaaacaatgatgagcacgtttgggaggatgatggtcactccagtcgagctgcacaagagcctcaacaccaaggtctggcagggacacactctggcctgggacaccattttcaaatcagtcaaagcttgtatcgacaaccggttagagaagtattctcagcagcctagtgcagatttcctttgtgacatttatcaccagaatcggctttcaaagaaagaattgtatgctgctgtcacagagctccagctggctgcggtggaaacgacagcaaacagtctaatgtggattctctacaatttatcccgtaatccccaagtgcaacaaaagcttcttaaggaaattcaaagtgtattacctgagaatcagaggccacgggaggaagatttgaggaatatgccgtatttaaaagcctgtctgaaagaatctatgaggcttaccccgggtgtaccatttacaactcggactcttgacaaggcaacagttctgggtgaatatgctttacccaaaggaacagtgctcatgctaaatacccaggtgttgggatccagtgaagacaattttgaagattcaagtcagtttagacctgaacgttggcttcaggagaaggaaaaaattaatccttttgcgcatcttccatttggcgttggaaaaagaatgtgcattggtcgccgattagcagagcttcaactgcatttggctctttgttggattgtccgcaaatacgacatccaggccacagacaatgagcctgttgagatgctacactcaggcaccctggtgcccagccgggaactccccatcgcgttttgccagcgataatacgcctcagatggtggtatttgctaacatcatatccaactcagggaagcggactgagtgctgggatccaaggcattctacagggttcactgctggtttacacttcacctgtgtcagcaccatcttcaggtgcttagaatggcctgggagcctgttctgtcttgcatcttccatgacatgaaagggaggctggcacttgtcagtcaggtagaggttacaaaccgtttcaggccctgctaccacattcactgtttgaatctttaattcccaagaataagtttacatttcacaatgaatgacctacaacagctaaattttctggggctgggagtaatactgacaatccatttactgtagctctgcttaatgtactacttaggaaaatgtccctgcttaataatgtaagccaagctaaatgatggttaaagttatcaggcctcccatgaaattgcgttcttcctgcattgaaataaaaacattattgggaaactagagaacacctctatttttaaaaggactttaacgaagtcaaacaacttctaagactagtgattcactggggcattatttgttagaggaccttaaaattgtttattttttaaatgtgattcctttatggcattagggtaaagatgaagcaataatttttaaattgtgtatgtgcatatgaagcacagacatgcatgtgtgtgtgtgtctgtgtgtgtgtgtccgtgtatgtgtgtgtgggttctaatggtaatttgcctcagtcatttttttaatatttgcagtacttgatttaggatctgtggtgcagggcatgtttcaaagtttagtcacagcttaaaaacattcagtgtgactttaatattataaaatgatttcccatgccataatttttctgtctattaaatgggacaagtgtaaagcatgcaaaagttagagatctgttatataacatttgttttgtgatttgaactcctaggaaaaatatgatttcataaatgtaaaatgcacagaaatgcatgcaatacttataagacttaaaaattgtgtttacagatggtttatttgtgcatatttttactactgcttttcctaaatgcatactgtatataattctgtgtatttgataaatatttcttcctacattatatttttagaatatttcagaaatatacatttatgtctttatattgtaataaatatgtacatatctaggtatatgctttctctctgctgtgaaattatttttagaattataattcacgtcttgtcatatttcatctgtataccttcaaattctctgaaagtaaaaataaaagtttttaaatatt

SEQ ID NO: 28831 - DNA, 5243 bp, Homo Sapiens
cggcggaggcggcggtgcagcgctccggtggaatgaatcttacttgttgaatatcttctggttactagttggattcatttgtgaaagaatcattttcccctgtgtggaagacacttagtggcatatttaaattataagtccacggatcaaaaagctttttgatttcccaaaggagggacataccactatatcagataagcttgacattacagccaagatggtgctgtcccagagacaacgagatgaactaaatcgagctatagcagattatcttcgttcaaatggctatgaagaggcatattcagtttttaaaaaggaagctgaattagatgtgaatgaagaattagataaaaagtatgctggtcttttggaaaaaaaatggacatctgttattagattacaaaagaaggttatggaattagaatcaaagctaaatgaagcaaaagaagaatttacgtcaggtggacctcttggtcagaaacgagacccaaaagaatggattccccgtccgccagaaaaatatgcattgagtggtcacaggagtccagtcactcgagtcattttccatcctgtgttcagtgttatggtctctgcttcagaggatgctacaattaaggtgtgggattatgagactggagattttgaacgaactcttaaaggacatacagactctgtacaggacatttcattcgaccacagcggcaagcttctggcttcctgttctgcagatatgaccattaaactatgggattttcagggctttgaatgcatcagaaccatgcacggccatgaccacaatgtttcttcagtagccatcatgcccaatggagatcatatagtgtctgcctcaagggataaaactataaaaatgtgggaagtgcaaactggctactgtgtgaagacattcacaggacacagagaatgggtacgtatggtacggccaaatcaagatggcactctgatagccagctgttccaatgaccagactgtgcgtgtatgggtcgtagcaacaaaggaatgcaaggctgagctccgagagcatgagcatgtggtagaatgcatttcctgggctccagaaagctcatattcctccatctctgaagcaacaggatctgagactaaaaaaagtggtaaacctgggccattcttgctgtctggatccagagacaagactattaagatgtgggatgtcagtactggcatgtgccttatgaccctcgtgggtcatgataactgggtacgtggagttctgttccattctggggggaagtttattttgagttgtgctgatgacaagaccctacgcgtatgggattacaagaacaagcgatgcatgaagaccctcaatgcgcatgaacactttgttacctccttggatttccacaagacggcaccctatgtcgtcactggcagcgtagatcaaacagtaaaagtgtgggagtgccgttgattgtgtctccttcggcccctcctccctcttttcctctggatgcactctgatgataccatggttaccccattgagctctgtttaaataaatattgtcctttcatgtaaattattctggatgtagattgagcttattaaatgttacacacaaagtattcatgcatggtgaatccaaattgtatactgtaaatttacatacgttgtctagaagtaccatagggtttaaaaacctgggctggcattggtcacaccaggcctaagaaggcagaagttgaatcaattgaactagggcactaaactgaatagttgacagtgtcattttatgttggattattaattcctgtttttctttctgctatctgttggtgcctgacttgatggcctcatttggggaaaagtggtggttattagggcttttcctgaaatgtgtatctatgtaacatcacttaagtgtgcttaataaatctcctgtaaggattttagatgataaggctacaattcagaatcttctgaaccatctatgtaatgaatggggattatacattggaatttttgtcatgacacatttgccaaatcagtaggatatatttgttttggcagcctatcacgcagaggctagtggtatatttatgtaagaaaatgactgtaaatctcaagaaaaatctcagcagctaatagcaactcatttatttcattttggtcttaatgctttgtaaacaggtcaaaaaatactgtcatactctaagcttctattttccacactggacatacttctagttgtattctccatactattagactgtgtagtgatgtgacttccaagtagaatttaatctccccattgagtgtgtcatggtacaaatcactattcgtttttggtgttttttagggatgtgcaatgtgcattacataatgacagaaatactgagaaggttctgtgtgcccatttgaaaggagtgggaggaatacagcagtttgtttttcaacatgaatctgatattgatttaaactgtgtttcacttacaagttttaaaaaaatgacagggtttaatggagcgtgcataaaaatgtactgttttcaccttttgtttatatgtaaatgtttgtaagtatatgggcctatctgtaagtgggtaagtctgtatgtgtgtatcatacacatcaacctccatgtccttagtcctgggtttttgaaaaagtgctaaaacggacaagtagaataaatgttgctgtggaatgccatgctttagaacaaaccctttttgatcttaatgcttctgaaaactaggtctgactctggggatttttttccagccgaaggaaaatcacttccgttatgtccccctctaatttagccgctcgacattttacacaacccggatatgttgtatattttgacccaaagttacaggtaggtttaagagaatttttagccatgacttttggagcactattccattgtcagttattaataaagaattccattgcttagctaaccaacaggttttttttgtttccaagagagttatttgaaaagttaacagaacaatgagataacagtgacagtttaacaaagataaaattctgaactgcgttttattcatttgtgtactatgtgattttttaaatgtcccctttagtatttaatggaaaattggttcctgcaaaagacaaagggtgagagttagcgtcctgtagatacacacagagactaggccgtatattaactagaagcagctttatgtctagcttgtgtctttttgtttgtttgcttgtttgtttttagattcctgagagatgtctctggaagggaaagttttgagaactaatggctatttttgaggacaaaaattacatcttaagctaattccttaaatacatacagtaggtgaattttcaggacaatattgcctcacaaccctgcttacattgaaaagtctttttcccttagctcttctgactggatttttctacaaaactatggaaaatatctttgttcttgtttgctgctattttctgtcctattttgagaaatataaatacatagaaatggtgcatcttaacatttgtttgtacatgtataaatgtcttgtattttaattcatttttagcatgaattgtttaagggtaagccacaacatctagaaatcactcatagatattgaacaataaaggagaatggtaccgatgcaggaggaagcaagcgtgtcttcccctgcagcacacagcgacttgcgttgacaaaggaggaggaaacgattactctgtaaacaaagttatccttacttgggagattgccacagcctgctgctgagttgagttaccagacatcctccatgtgagaagcagcgaacattgaatctcagggatggcccacaactgggtccacatgtaatgagccctgtttaataacgaaggggtgggggagagcagtccgtctacaacctggaatcagatttgcaaaatttcctgcactgctgtctgacactgtcctgttgatgccctttctgactgtgttctctgttttctctgtctgctgtctaaccctgtgccttgcctgggataaggacaatgatgaggttactggtttggattgtaagtagaggacttttattaattggtttagaggttcactgctgctttgtcactttctcaatcaaattggccacttaagaaataaagagctggtagaattgcatcctcagatgattattgactgtgtgtgtgtgtgaaaacagacattccagtgccacccaaatatatatctgtaacgtgcccaagaaatcctagctgcgctcttgagagtgcatgccatggagactggtttagacaccgcgtggagcctagttgcctgttgtcacggcatcttgcactttaggagactaagaccgtcctggttcgtctgtgtgtggtgtgaccaatggtgtgcccagagcactactctcaaaatcactagtgttagcaagtcgtcccgggctggggagcgttcgccgtagtctttggaagctttggctttagatttaccaagccccgcctccccgctgccagtgccctgctctcccgttcgcctctttctgtttctgtgtgaactttcccggtaatatcactcgttaaataggttttctttaaacttaattaaggaaaaactatttaaaggtaaaggatattttgttgacatcggtggctcgatcatccttaagcaactgaagttaaaattgttgaaggaaaaggcacttaaattggttactttcatgtccagctgtatataagtccagtgtgttcatctagatgacgcaaagaatctcctggtagagaagcgacatgtaaaaaactggtggaaaaaggttttggattttttttccagtggggtggggggagggcaagctggatttacaggtcacggctggactgaatgggcctttttatcttcccactgtatcatggaagtagctgcttgcttgtactgtccatccttcaggcatccctaaagctcactctgaagatgttagagacaaacacaaactcttcgagttaaagttgatcctgacactgacatgaaggcaagccttgatttcgtatgaacgttgctgaagtggtaattgaggaaaacagttccccagattgttaagagttcactgaagatattgacacaattttaaaaaatcagtaaaggaatgtatataatattgctctcgtgttttacagtaagatttgttgctctcagactgtgtaaaacaaaatttattcatgttttctgcatattaaaaaatcttattgtaccaactggtaaaccg

SEQ ID NO: 28832 - DNA, 3376 bp, Homo Sapiens
tttggggctgagtttaataagcgagcgagcgagcaagcgagcgcggggggaaaaaggcagagaatgtccgccatctaccctccgctcctgggcgcgctctcattcatagcagcctcttcatgaattacagctgagggggggcggaggaggggggggtaccacacaacaccccagcaaacctccgggcccccaggcatggctagctcgtgttccgtgcaggtgaagctggagctggggcaccgcgcccaggtgaggaaaaaacccaccgtggagggcttcacccacgactggatggtgttcgtacgcggtccggagcacagtaacatacagcactttgtggagaaagtcgtcttccacttgcacgaaagctttcctaggccaaaaagagtgtgcaaagatccaccttacaaagtagaagaatctgggtatgctggtttcattttgccaattgaagtttattttaaaaacaaggaagaacctaggaaagtccgctttgattatgacttattcctgcatcttgaaggccatccaccagtgaatcacctccgctgtgaaaagctaactttcaacaaccccacagaggactttaggagaaagttgctgaaggcaggaggggaccctaataggagtattcataccagcagcagcagcagcagcagcagtagcagcagcagcagcagcagcagcagcagcagtagcagcagcagcagcagcagcagcagcagcagtagcagcagcagtagcagcagcagcagcagcagtagtaccagtttttcaaagcctcacaaattaatgaaggagcacaaggaaaaaccttctaaagactccagagaacataaaagtgccttcaaagaaccttccagggatcacaacaaatcttccaaagaatcctctaagaaacccaaagaaaataaaccactgaaagaagagaaaatagttcctaagatggccttcaaggaacctaaacccatgtcaaaagagccaaaaccagatagtaacttactcaccatcaccagtggacaagataagaaggctcctagtaaaaggccgcccatttcagattctgaagaactctcagccaaaaaaaggaaaaagagtagctcagaggctttatttaaaagtttttctagcgcaccaccactgatactcacttgttctgctgacaaaaaacagataaaagataaatctcatgtcaagatgggaaaggtcaaaattgaaagtgagacatcagagaagaagaaatcaacgttaccgccatttgatgatattgtggatcccaatgattcagatgtggaggagaatatatcctctaaatctgattctgaacaacccagtcctgccagctccagctccagctccagctccagcttcacaccatcccagaccaggcaacaaggtcctttgaggtctataatgaaagatctgcattctgatgacaatgaggaggaatcagatgaagtggaggataacgacaatgactctgaaatggagaggcctgtaaatagaggaggcagccgaagtcgcagagttagcttaagtgatggcagcgatagtgaaagcagttctgcttcttcacccctacatcacgaacctccaccacccttactaaaaaccaacaacaaccagattcttgaagtgaaaagtccaataaagcaaagcaaatcagataagcaaataaagaatggtgaatgtgacaaggcatacctagatgaactggtagagcttcacagaaggttaatgacattgagagaaagacacattctgcagcagatcgtgaaccttatagaagaaactggacactttcatatcacaaacacaacatttgattttgatctttgctcgctggacaaaaccacagtccgtaaactacagagttacctggaaacatctggaacatcctgaggatataacaactggatgcatcaagaactattgtgttttttttttttggttttttttttttttggttgtgattttttgttcttgttgtttatatgaaaacactcaaaatgatgcaaccaaaagggaaaaaataaaaatcaaacaaccttcagctttatttttctttaaagccagtcatcatctcttgataaaggagaggttaaagcaaaccagcctcagcggaccactcttctctccaaggaaatccccgggaagagttagcctggatagccttgaaaacaaacaaatcaaacacaacacaagaaaactcaaagaatgtgtatggtatcatgtatctctctgtggtggttcattccacaggacgaatgcatattcaacacactgccttattacataactgatctatttattatcgcatacagatattctaagtcgttgagggaatgacaccatcagacattataagtacttggtcccgtggatgctctttcaatgcagcacccttgccatcccaagcccagtgaccttactcgtataccgtgccactttccaccaactttttccaagtcctttaactcgttgcagtctgtattttccaccttttgtttttccagttccaggacacagattatcaactggggggaccaaatagccaccttgattttcttctttgtggtctttttcctgaaagttggggcccagtccttggctgtatccatgtaatgatcttggaccatggtagaaaatgcaccaaataggatcatatgaattgctgtctagccttagtcaataaacttgtaggacttttaaacaaaagtgtacctgtaaatgtcctgaatccagcattgttgagctgtcatcaacattcttgtgtctgttttactgttacaatattaggtgaatatggaagtaaaggcattccacaggatcatcatttaaaaaaaaagaattctggtcctgttttctaaaaaaaaaaaactgttgtagaaattcttaatttggatctatttattagtcagagtttcagctttcttcagctgccagtgtgttactcatctttatcctaaaaatctggaatcagagatttttgtttgttcacatatgattctcttagacacttttatatttgaaaaaattaaaatctttctttggggaaaaattcttggttattctgccataacagattatgtattaacttgtagattcagtggttcaatacctgtttagttgcttgctaatatttccagaaggatttcttgtattggtgaaagacggttggggatggggggatttttttgttcttgttgtacccttgttttgaaactagaaatctgtcctgtggcatgcaaaagaaagcaaattatttttaaaagaaaaaaaccaaagtacttttggtgtcattattccatcttctccataagtggagaaatgaaaagtaagaacagctcatcttcaaagtttttactagaaattc

SEQ ID NO: 28833 - DNA, 3999 bp, Homo Sapiens
atgcagcaggcgccgcagccttacgagttcttcagcgaggagaacagtccgaaatggcggggactgttggtctcggccctgcggaaggttcaggttcaagtgcatcccactctctcagctaatgaagagtctctctattatattgaagagctgatttttcagctgcttaataaattatgcatggcccagccaaggactgttcaagatgtagaggagcgagttcagaagacctttcctcacccaattgataaatgggccattgctgatgcacaatctgctatagaaaaacgaaaacgaagaaatcctcttttactgcctgtggacaaaatccatccttcgttgaaggaagtattagggtacaaagtggactaccatgtatccctatatattgtggctgtactagagtatatctcagctgatattttaaaattggctggtaattatgtttttaatatccggcattatgaaatatctcagcaggacattaaagtgtcaatgtgtgcggataaggttttgatggacatgtttgatcaggatgacataggtttggtttctctctgtgaagatgaaccctgttcttctggtgaattaaactactatgatcttgtcagaactgaaatcgcagaagaaagacagtatctacgggaattaaatatgatcataaaagtgtttcgagaagcctttctttctgatagaaagctgtttaaaccttctgtatacgaaaagatttttagtaacatttcagatatacatgaattgactgtgaaacttttaggtttgattgaagacacagttgaaatgactgatgaaagcagtcctcatcccttagctggcagctgttttgaagatttggcagaagagcaagcatttgatccttatgaaacattatcacaggacattctttcaccagagtttcatgaacatttcaataaattgatggccagacctgcagttgctctacactttcagtccattgctgatggttttaaagaggcagttcgttatgtccttccacgtcttatgctggtgccagtgtatcactgttggcactactttgagttactaaagcaattgaaagcatgtagtgaagaacaagaagacagagaatgtttgaaccaagctattactgctctcatgaatcaccaaggtagcatggaccgaatttacaagcagtattcacctagacgtcgacctggagatcctgtttgccctttttatagtcaccaattaagaagcaaacacctggctatcaaaaaaatgaatgaaattcagaaaaatatcgatggatgggaaggcaaagatattggacagtgttgtaatgaattcattatggagggaccattgacaagaatcggtgccaaacatgaacggcatatttttctgtttgatggcttaatgatcagttgtaaacctaatcatggccagactcggcttccaggttacactagtgcagaatacaggttaaaagaaaaatttgtcatgaggaaaatacaaatttgtgataaagaagatacttgtgagcacaagcatgcatttgaattagtatccaaagatgagaacagcataatatttgctgctaagtctgctgaagaaaaaaacaactggatggcagcccttatttctcttcattatcgtagtactctagatcgaatgttagattcagtattattgaaagaagaaaatgagcaaccactgagattaccaagtcctgaagtatatcgttttgtagtaaaagactctgaggaaaacattgtttttgaagacaacttgcaaagtagaagtggcatccccattattaaaggaggaactgtagtgaaattaattgaaaggttaacatatcatatgtatgcagatcccaattttgttcgtacttttcttaccacatatcgttcattttgtaaaccacaggaattgctgagcttactgattgaacggtttgaaattccagagccagaacctactgacgcagacaaattggcaatagagaaaggcgagcagccaatcagtgcagaccttaaaagatttcgcaaggaatatgtccaaccagtacaacttagggtacttaatgtattccgccattgggttgaccatcattattatgactttgaaagagacctggaattgctggaaagactagaatccttcatttcaagtgtaagagggaaagctatgaaaaaatgggtagagtcaattgctaagatcatcaggaggaagaagcaagctcaggcaaatggagtaagccataatattacctttgaaagtccacctccaccaattgaatggcatatcagcaaaccaggacagtttgaaacatttgatctcatgacacttgatccaatagaaattgcacgtcagctgacacttttggagtctgatctttacaggaaagttcaaccgtctgaacttgtagggagtgtgtggaccaaagaagataaagaaataaattctccaaatttattaaaaatgattcgccataccacaaatctcaccctctggtttgaaaaatgcattgtggaagcagaaaattttgaagaacgggtggcagtactaagtagaattatagaaattctgcaagtttttcaagatttgaataatttcaatggcgtattggagatagtcagtgcagtaaattcagtgtcagtatacagactagaccatacctttgaggcactgcaggaaaggaaaaggaaaattttggacgaagctgtggaattaagtcaagatcactttaaaaaatacctagtaaaacttaagtcaatcaatccaccttgtgtgcctttttttggaatatatttaacaaatattctgaagaccgaagaagggaataatgattttttaaaaagaaagggaaaagatttaatcaatttcagtaagaggaggaaagtagctgaaattactggagaaattcagcagtatcagaatcagccttactgtttacggatagaaccagatatgaggagattctttgaaaaccttaaccccatgggaagtgcatctgaaaaagagtttacagattatttgttcaacaagtcactagaaattgaacctcgaaactgcaaacagccacctcgatttcctaggaaatcaactttttccttaaaatctcctggaataaggcctaacacaggccgacatggctctacctcaggtactttacgaggtcacccaacaccattagaaagagaaccatgtaaaataagctttagtcggattgctgaaactgagctggaatcaacagtgtcagcaccaacctctccaaatacaccatctactccaccagtatctgcttcttcagaccttagtgtatttttagatgtggatctcaacagctcctgtggcagcaatagcatctttgctccagtgcttttgccacattcaaagtctttctttagttcatgtggtagtttacataaactaagtgaagagcccctgattcctcctcctcttcctcctcgaaaaaagtttgatcatgatgcttcaaattccaagggaaatatgaaatctgatgatgatcctcctgctattccaccgagacagcctcctcctccaaaggtaaaacccagagttcctgttcctactggtgcatttgatgggcctctgcatagtccacctccgccaccaccaagagatcctcttcctgatacccctccaccagttccccttcggcctccagaacactttataaactgtccatttaatcttcagccacctccactggggcatcttcacagagattcagactggctcagagacattagtacgtgtccaaattcgccaagcactcctcctagcacaccctctccaagggtaccgcgtcgatgctatgtgctcagttctagtcagaataatcttgctcatcctccagctccccctgttccaccaaggcagaattcaagccctcatctgccaaaactgccaccaaagacttacaaacgggagctttcgcaccccccattgtacagactgcctttgctagaaaatgcagaaactccccaatga

SEQ ID NO: 28834 - DNA, 9662 bp, Homo Sapiens
gagcccggcccgggggacgggcggcgggatagcgggaccccggcgcggcggtgcgcttcagggcgcagcggcggccgcagaccgagccccgggcgcggcaagaggcggcgggagccggtggcggctcggcatcatgcgtcgagggcgtctgctggagatcgccctgggatttaccgtgcttttagcgtcctacacgagccatggggcggacgccaatttggaggctgggaacgtgaaggaaaccagagccagtcgggccaagagaagaggcggtggaggacacgacgcgcttaaaggacccaatgtctgtggatcacgttataatgcttactgttgccctggatggaaaaccttacctggcggaaatcagtgtattgtccccatttgccggcattcctgtggggatggattttgttcgaggccaaatatgtgcacttgcccatctggtcagatagctccttcctgtggctccagatccatacaacactgcaatattcgctgtatgaatggaggtagctgcagtgacgatcactgtctatgccagaaaggatacatagggactcactgtggacaacctgtttgtgaaagtggctgtctcaatggaggaaggtgtgtggccccaaatcgatgtgcatgcacttacggatttactggaccccagtgtgaaagagattacaggacaggcccatgttttactgtgatcagcaaccagatgtgccagggacaactcagcgggattgtctgcacaaaacagctctgctgtgccacagtcggccgagcctggggccacccctgtgagatgtgtcctgcccagcctcacccctgccgccgtggcttcattccaaatatccgcacgggagcttgtcaagatgtggatgaatgccaggccatccccgggctctgtcagggaggaaattgcattaatactgttgggtcttttgagtgcaaatgccctgctggacacaaacttaatgaagtgtcacaaaaatgtgaagatattgatgaatgcagcaccattcctggaatctgtgaagggggtgaatgtacaaacacagtcagcagttacttttgcaaatgtccccctggtttttacacctctccagatggtaccagatgcatagatgttcgcccaggatactgttacacagctctgacaaacgggcgctgctctaaccagctgccacagtccataaccaaaatgcagtgctgctgtgatgccggccgatgctggtctccaggggtcactgtcgcccctgagatgtgtcccatcagagcaaccgaggatttcaacaagctgtgctctgttcctatggtaattcctgggagaccagaatatcctcccccaccccttggccccattcctccagttctccctgttcctcctggctttcctcctggacctcaaattccggtccctcgaccaccagtggaatatctgtatccatctcgggagccaccaagggtgctgccagtaaacgttactgattactgccagttggtccgctatctctgtcaaaatggacgctgcattccaactcctgggagttaccggtgtgagtgcaacaaagggttccagctggacctccgtggggagtgtattgatgttgatgaatgtgagaaaaacccctgtgctggtggtgagtgtattaacaaccagggttcgtacacctgtcagtgccgagctggatatcagagcacactcacgcggacagaatgccgagacattgatgagtgtttacagaatggccggatctgcaataatggacgctgcatcaacacagatggcagttttcattgcgtgtgtaatgcgggctttcatgttacacgagatgggaagaactgtgaagatatggatgaatgcagcataaggaacatgtgccttaatggaatgtgtatcaatgaagatggcagttttaaatgtatttgcaaacctggattccagctggcatcagatggacgttattgcaaagacattaacgagtgtgaaacccctgggatctgcatgaatgggcgttgcgtcaacactgatggctcctacagatgtgaatgcttccctggactggctgtgggtctggatggccgtgtgtgtgttgacacacacatgcggagcacatgctatggtggatacaagagaggccagtgtatcaaacctttgtttggtgctgtcactaaatctgaatgctgttgcgccagcactgagtatgcatttggggaaccttgccagccgtgtcctgcacagaattcagcggaatatcaggcactctgcagcagtgggccaggaatgacgtcagcaggcagtgatataaatgaatgtgcactagatcctgatatttgcccaaatggaatctgtgaaaaccttcgtgggacctataaatgtatatgcaattcaggatatgaagtggattcaactgggaaaaactgcgttgatattaatgaatgtgtactgaacagtctcctttgtgacaatggacaatgtagaaatactcctggaagttttgtctgtacctgccccaagggatttatctacaaacctgatctaaaaacatgtgaagacattgatgaatgcgaatcaagtccttgcattaatggagtctgcaagaacagcccaggctcttttatttgtgaatgttcttctgaaagtactttggatccaacaaaaaccatctgcatagaaaccatcaagggcacttgctggcagactgtcattgatgggcgatgtgagatcaacatcaatggagccaccttaaagtcccagtgctgctcctccctcggtgctgcgtggggaagcccgtgcaccctatgccaagttgatcccatatgtggtaaagggtactcaagaattaaaggaacacaatgtgaagatatagatgaatgtgaagtgttcccaggagtgtgtaaaaatggcctgtgtgttaacactagggggtcattcaagtgtcagtgtcccagtggaatgactttggatgccacaggaaggatctgtcttgatatccgcctggaaacctgcttcctgaggtacgaggacgaggagtgcaccctgcctattgctggccgccaccgcatggacgcctgctgctgctccgtcggggcagcctggggtactgaggaatgcgaggagtgtcccatgagaaatactcctgagtacgaggagctgtgtccgagaggacccggatttgccacaaaagaaattacaaatggaaagcctttcttcaaagatatcaatgagtgcaagatgatacccagcctctgcacccacggcaagtgcagaaacaccattggcagctttaagtgcaggtgtgacagcggctttgctcttgattctgaagaaaggaactgcacagacattgacgaatgccgcatatctcctgacctctgtggcagaggccagtgtgtgaacacccctggggactttgaatgcaagtgtgacgaaggctatgaaagtggattcatgatgatgaagaactgcatggatattgatgagtgtcagagagatcctctcctatgccgaggtggtgtttgccataacacagagggaagttaccgctgtgaatgcccgcctggccatcagctgtcccccaacatctccgcgtgtatcgacatcaatgaatgtgagctgagtgcacacctgtgccccaatggccgttgcgtgaacctcatagggaagtatcagtgtgcctgcaaccctggctaccattcaactcccgataggctattttgtgttgacattgatgaatgcagcataatgaatggtggttgtgaaaccttctgcacaaactctgaaggcagctatgaatgtagctgtcagccgggatttgcactaatgcctgaccagagatcatgcaccgacatcgatgagtgtgaagataatcccaatatctgtgatggtggtcagtgcacaaatatccctggagagtacaggtgcttgtgttatgatggattcatggcatctgaagacatgaagacttgtgtagatgtcaatgagtgtgacctgaatccaaatatctgcctaagtgggacctgtgaaaacacgaaaggctcatttatctgccactgtgatatgggctactccggcaaaaaaggaaaaactggctgtacagacatcaatgaatgtgaaattggagcacacaactgtggcaaacatgctgtatgtaccaatacagcaggaagcttcaaatgtagctgcagtcccgggtggattggagatggcattaagtgcactgatctggacgaatgttccaatggaacccatatgtgcagccagcatgcagactgcaagaataccatgggatcttaccgctgtctgtgcaaggaaggatacacaggtgatggcttcacttgtacagaccttgatgagtgctctgagaacctgaatctctgtggcaatggccagtgcctcaatgcaccaggaggataccgctgtgaatgcgacatgggcttcgtgcccagtgctgacgggaaagcctgtgaagatattgatgagtgctcccttccgaacatctgtgtctttggaacttgccacaacctccctggcctgttccgctgtgagtgtgagataggctacgaactggacagaagcggcgggaactgcacagatgtgaatgaatgcctggatccaaccacgtgcatcagtgggaactgtgtcaacactccaggcagctatatctgtgactgcccacctgattttgaactgaacccaactcgagttggctgtgttgatacccgctctggaaattgctatttggatattcgacctcgaggagacaatggagatacagcctgcagcaatgaaattggagttggtgtttccaaagcttcctgctgctgttctctgggtaaagcctggggtactccttgtgagatgtgtcctgctgtgaacacatccgagtacaaaattctttgtcctggaggggaaggtttccgaccaaatcctatcaccgttatattggaagatattgatgagtgccaggagctaccagggctgtgccaaggaggaaaatgtatcaacacctttgggagtttccagtgccgctgtccaaccggctactacctgaatgaagatacacgagtgtgtgatgatgtgaatgaatgtgagactcctggaatctgtggtccagggacatgttacaacaccgttggcaactacacctgtatctgtcctccagactacatgcaagtgaatgggggaaataattgcatggatatgagaagaagtttgtgctacagaaactactatgctgacaaccagacctgtgatggagaattgttattcaacatgaccaagaagatgtgctgctgttcctacaacattggccgggcgtggaacaagccctgtgaacagtgtcccatcccaagtacagatgagtttgctacactctgtggaagtcaaaggccaggctttgtcatcgacatttataccggtttacccgttgatattgatgagtgccgggagatcccaggggtctgtgaaaatggagtgtgtatcaacatggttggcagcttccgatgtgaatgtccagtgggattcttctataatgacaagttgttggtttgtgaagatattgacgagtgtcagaacggcccagtgtgccagcgcaacgccgaatgcatcaacactgcaggcagctaccgctgtgactgtaagcccggctaccgcttcacctccacaggacagtgcaatgatcgtaatgaatgtcaagaaatccccaatatatgcagtcatgggcagtgcattgacacagttggaagcttttattgcctttgccacactggttttaaaacaaatgatgaccaaaccatgtgcttggacataaatgaatgtgaaagagatgcctgtgggaatggaacttgccggaacacaattggttccttcaactgccgctgcaatcatggtttcatcctttctcacaacaatgactgtatagatgttgatgaatgtgcaagtggaaatgggaatctttgcagaaatggccaatgcattaatacagtggggtctttccagtgccagtgcaatgaaggctatgaggtggctccagatgggaggacctgtgtggatatcaatgaatgtcttctagaacccagaaaatgtgcaccaggtacctgtcaaaacttggatgggtcctacagatgcatttgcccacctggatacagtcttcaaaatgagaagtgtgaagatattgatgagtgtgtcgaagagccagaaatttgtgccctgggcacatgcagtaacactgaaggcagcttcaaatgtctgtgtccagaagggttttccttgtcctccagtggaagaaggtgccaagatttgcgaatgagctactgttatgcgaagtttgaaggaggaaagtgttcatcacccaaatccagaaatcactccaagcaggaatgctgctgtgccttgaagggagaaggctggggagacccctgcgagctctgccccacggaacctgatgaggccttccgccagatatgtccttatggaagtgggatcatcgtgggacctgatgattcagcagttgatatggacgaatgcaaagaacccgatgtctgtaaacatggacagtgcatcaatacagatggttcctatcgctgcgagtgtccctttggttatactctagcagggaatgaatgtgtagatactgatgaatgttctgttggcaatccttgtggaaatggaacctgcaagaatgtgattggaggttttgaatgcacctgcgaggagggatttgagcccggtccaatgatgacatgtgaagatataaatgaatgtgcccagaatcctctgctctgtgccttccgatgtgtgaacacttatgggtcatatgaatgcaaatgtcccgtgggatatgtgctcagagaagaccgtaggatgtgcaaagatgaggatgagtgtgaagagggaaaacatgactgtactgaaaaacaaatggaatgcaagaacctcattggcacatatatgtgcatctgtggacccgggtatcagcggagacctgatggagaaggctgtgtagatgagaatgaatgtcagacgaagccagggatctgtgagaatgggcgctgcctcaacacccgtgggagctacacctgtgagtgtaatgatgggtttaccgccagccccaaccaggacgagtgccttgacaatcgggaagggtactgcttcacagaggtgctacaaaacatgtgtcagatcggctccagcaacaggaaccccgtcaccaaatcggaatgctgctgtgacggagggagaggctggggtccccactgtgagatctgccctttccaggggactgtggctttcaagaaactctgtccccatggccgaggattcatgaccaatggagcagatatcgatgaatgcaaggttattcacgatgtttgccgaaatggggaatgtgtcaatgacagaggatcatatcattgcatttgtaaaactgggtacactccagatataactgggacttcctgtgtagatctgaacgagtgcaaccaggctcccaaaccctgcaattttatctgcaaaaacacagaagggagttaccagtgttcatgcccgaaaggctacattctgcaagaggatggaaggagctgcaaagatcttgatgagtgtgcaaccaagcaacacaactgccagttcctatgtgttaacaccattggcggcttcacatgcaaatgtcctcccggatttacccaacaccatacgtcctgcattgataacaatgaatgcacctctgacatcaatctgtgcgggtctaagggcatttgccagaacactcctggaagcttcacctgtgaatgccagcggggattctcacttgatcagaccggctccagctgtgaagacgtggacgagtgtgagggtaaccaccgctgccagcatggctgccagaacatcattgggggctacaggtgcagctgcccccagggctacctccagcactaccagtggaaccagtgtgttgatgaaaacgaatgcctcagcgctcacatctgcggaggagcctcctgtcacaacaccctggggagctacaagtgcatgtgtcccgccggcttccagtatgaacagttcagtggaggatgccaagacatcaatgaatgtggctctgcgcaggccccctgcagctatggctgttccaataccgagggcggttacctgtgtggctgtccacctggttacttccgcataggccaagggcactgtgtttctggaatgggcatgggccgaggaaacccagagccacctgtcagtggtgaaatggatgacaattcactctccccagaggcttgttacgagtgtaagatcaatggctaccccaaacggggcaggaaacggagaagcacaaacgaaactgatgcctccaatatcgaggatcagtctgagacagaagccaatgtgagtcttgcaagttgggatgttgagaagacagccatctttgctttcaatatttcccacgtcagtaacaaggttcgaatcctagaactccttccagctcttacaactctgacgaatcacaacagatacttgatcgaatctggaaatgaagatggcttctttaaaatcaaccaaaaggaagggatcagctacctccacttcacaaagaagaagccagtggctggaacctattcattacaaatcagtagtactccactttataaaaagaaagaacttaaccaactagaagacaaatatgacaaagactacctcagtggtgaactgggtgataatctgaagatgaaaatccaggttttgcttcattaattcaccatccagaaccaaataattaaaagaaaaacaaatatagataggtagaactatattttcccccaatcagaatcatcatatcataggtacaatctttcaccaagtaaatttgtataaataagcactattctttgtattaccaaagcaaggtacaggtgactaccctagttcaaaacaaccactttctcaggcttctcatgtgtgtagctaagctaccttgtcatatgtgttgattcttgaaaactgggacgtgtatttccattgggggttggccatttatgctgacatgccatccttccagcaaacgtagggaatgtgctttcaattgatggactactctattttttgcaaatttgtaaactttgcttctccaaatacaagtactaggttgtccatttatggtacctatttggtgctagtaaattttcaaactagatttataaatgcactgtaatatgtacacaacttagaaaccaaattacaagtattcagttccaatacttcattaatttcaatcaaccaaagttagttcagtagcttatctcagttatgagtataatacattacatgtaaattaagtgtgtgtatactgtaatcgtgctattttttatcattgaaacatttataaactagaataataatgcccttaatgtgagggtttgtaatggtgcttattaagaccaaagacttgttaaatgtatacaccaagtggtaatgaaatttcgtgactggcccacacgtgcatagaggtctgggaggaccaggaaacagcctcagtggccagaggatcaccagtgcatccttcatcacagcatgtgcaatatgccaagattaccctcggtcattcctgtcaacaaggggtcaatgtcataaatgtcacaataaaacaatctcttcttttttttagttt

SEQ ID NO: 28835 - DNA, 1037 bp, Homo Sapiens
gcagttatcatagagcacagtccctcacatcacacagctgcagagatgaataaacaaagaggaaccttctcagaagtgagtctggcccaggacccaaagccgcagcaaaggaaacctaaaggcaataaaagctccatttcaggaaccgaacaggaaatattccaagtagaattaaaccttcaaaatgcttctctgaatcatcaagggattgacaaaatatatgactgccaaggtttactgccacctccagagaagctcactgccgaggtcctaggaatcatttgcattgtcctgatggccactgtgttaaaaacaatagttcttattcctttcctggagcagaacaattcttccccgaatacaagaacgcagaaagcacgtccttgtggccattgtcctgaggagtggattacatattccaacagttgttactacattggtaaggaaagaagaacttgggaagagagtttgcaggcctgtgcttcaaagaactcttctagtctgctttctatagataatgaagaagaaatgaaatttctggccagcattttaccttcctcatggattggtgtgtttcgtaacagcagtcatcatccatgggtgacaataaatggtttggctttcaaacatgagataaaagactcagatcatgctgaacgtaactgtgcaatgctacatgtacgtggacttatatcagaccagtgtggatcttcaagaatcattagacggggtttcatcatgttgaccaggctggtcttgaactcctgagctcaagaaatcaacacatcttggcctcccaagttgctgggattactgacacaagccaccgcccctgagtgctcatgtaccatttagcttgtgttttaaaaatctactttttctgccctccctattttaactagatgatgttttaaaaattacttttccctctctatatagtttgatttaagcattagtcatttacaacaaatattaatattaaaatgcagaccgttatgattggaaaataaatcaatgaacaatataaaaaaaaaaaa

SEQ ID NO: 28836 - DNA, 3000 bp, Homo Sapiens
tccaattcaaaaagaaagtctctgacgttagttagtttaatttaacatctttttatgtgtaacacttgactttggaagcaaaaatgaactttgcggagagagagggctctaagagatactgcattcaaacgaaacatgtggccattctctgtgcggtggtggtgggtgtaggattaatagtgggacttgccgtgggcttgaccagatcgtgtgactccagcggggacggcgggccgggcactgcgccagctccttcccacctgccttcttccacggccagcccctcaggtcctcctgcccaggaccaggacatctgcccggccagtgaggatgagagcggacagtggaaaaactttcgactgccggacttcgtcaacccagtccactacgacctgcacgtgaagcccctgttggaggaggacacctacacgggcaccgtgagcatctccatcaacctgagcgctcccacccggtacctgtggctgcacctccgggagaccaggatcacccggctcccggagctgaagaggccctctggggaccaggtgcaagtccggaggtgtttcgagtacaaaaagcaggagtacgtggtggtcgaggcggaggaagagcttacccccagcagtggagatggcctgtatctcctgaccatggagttcgccggctggctgaacggctccctcgtgggattttatagaaccacctacacggagaacggacgagtcaagagcatagcggccaccgatcatgaaccaacagatgccaggaaatcttttccttgttttgatgagcccaacaaaaaggcaacttatacaatatctatcacccatcccaaagaatacggagcactttcaaatatgccagtggcgaaagaagagtcagtggatgataaatggactcgaacaacttttgagaagtctgtccccatgagcacgtacctggtgtgctttgctgtacatcaatttgactctgtaaagagaatatcaaatagtggaaaacctcttacaatttatgtccagccagagcaaaagcacacagccgaatatgctgcaaacataactaaaagtgtgtttgattattttgaagaatactttgctatgaattattctcttcctaaattagataaaatcgctattccagattttggcactggtgccatggagaactggggactcatcacgtacagagaaacgaacctgctttatgaccctaaggaatcagcctcatcaaaccaacagagggtggccactgtggttgcccatgaacttgtgcatcagtggtttggaaatattgtgaccatggactggtgggaagacttgtggctaaatgaaggatttgcttctttctttgagtttctgggagtaaaccatgcagaaacagactggcaaatgcgtgaccaaatgttacttgaagatgtattacctgttcaagaggatgattctttgatgtcttcgcatccaattattgtgactgtgacaacccctgatgaaataacatctgtttttgatggaatatcctatagcaagggatcttctattttgagaatgcttgaagactggataaaaccagagaattttcaaaaaggatgtcagatgtacttggaaaaataccaattcaagaatgcaaaaacttctgatttttgggcagcactggaagaggcaagtaggctaccagtgaaagaagtaatggacacctggaccagacagatgggttatcctgtgcttaacgtgaacggtgtcaagaacatcacacagaaacgctttttgttggacccaagagctaacccttctcagcccccttcagatcttggttatacatggaatatcccagttaaatggactgaagataatataacaagcagtgtgttatttaataggtcagaaaaagaaggaatcactttgaactcctctaatcctagtggaaatgcttttctcaaaataaacccagatcatattgggttttatcgtgtaaattatgaagtagcaacttgggactcgatagctacagcgctctccttgaaccacaagacattttcttcagcagatcgtgcaagtcttattgatgatgcttttgccttggcaagagctcaacttctagattataaggtggctttgaacttgaccaagtatctcaaaagggaagagaattttttaccatggcagagagtaatttcagctgtaacctacatcattagcatgtttgaagatgataaagagctatatcctatgattgaggaatacttccaaggtcaagtgaagcctattgcagattctctgggatggaatgatgctggagaccatgtcacaaagttactccgttcctccgtgttagggtttgcgtgcaagatgggagacagagaagccttgaacaatgcttcctcgttatttgagcagtggctaaatgggactgtaagccttcccgtaaatctcaggcttctggtgtatcggtatgggatgcagaactctggcaatgagatttcatggaactacactcttgagcaataccagaaaacttcattagctcaagaaaaagaaaaactgctgtatggattagcatcagtgaagaacgttactcttttgtcaaggtatttggatttgctcaaggacacgaaccttattaaaactcaggatgtgtttacagtcattcgatatatctcatataacagctatgggaagaacatggcctggaattggatacaactcaactgggactatctagtcaacagatatacactcaataacagaaaccttggccgaattgtcacaatagcagagccattcaacactgaactgcaactgtggcagatggagagcttttttgcaaaatatccacaagctggagcaggagaaaaacctagggaacaagtgctggaaacagtgaaaaacaatatagagtggctaaaacaacatagaaacaccatcagagaatggttttttaatttacttgagagtggttaatgtattcaaatgttagagtttaattttgtgaatctattgtttc

SEQ ID NO: 28837 - DNA, 7888 bp, Homo Sapiens
tccgggtatggatgtcaatcttttgtctacaatgtgaatacatttatccttcggggaccatcaagactttcaggaaaggccccgcctgtctctgcgcggccactttgctgggacaaaggtcaactgaagaagtgggcaggcccgaggcaggagagatgctgaggagtccatgtgcaggggagggaaagggagaggcagtcagggagaggaggaggaggtaccgccagaaggggatcctcccgctccgaaaaccagacaccgggtcttgccctgtggtccaggcaggagtgcagtggtgcaacctcagctcactgcagccttgacctccccgggctcaagcgatcctccggccacagcacttggctgttcagcggctggaggagcagggccccaggtcctccccaccctcacctgctgctcccaggtcgtggccgtcttgctcttccaggtccttctctagggatgcaatattcacattgctaagatgcaggtctaacgcagaacctgtcaacagagccccccatcatccacagcccacccagcgctgcagagctcaggaagcctagctgaggaggacgaccgtcccacctgggcttagagtgagaccaagggcagaaggcgtgggagttgctggggcagccagggaaggacacccccagcccgtcctcgcagccccccacaggcagtgggaggcttggctgttcctccggcaaaacgggcatgctcagtgggccgggccggcaggtttgcgtggccgctgagttgccggcgccggctgagccagcggacgccgcgttccttggcggccgccggttcccgggaagttacgtggcgaagccggcttccgaggagacgccgggaggccacgggtgctgctgacgggcgggcgaccgggcgaggccgacgtggccgggctgcgaaagctgcgggaggccgagtgggtgaccgcgctcggagggaggtgccggtcgggcgcgccccgtggagaagacccgggcggggcgggcgcttcccggacttttgtccgagttgaattccctccccctgggccgggcccttccgtccgcccccgcccgtgccccgctcgctctcgggagatgtttatttgggctgtggcgtgaggagcgggcgggccagcgccgcggagtttcgggtccgaggagcctcgcgcggcgctggagagagacaagatgtccgccagagctgcggccgccaagagcacagcaatggaggaaacagctatatgggaacaacatacagtgacgcttcacagggctcctggatttggatttggaattgcaatatctggtggacgagataatcctcattttcagagtggggaaacgtcaatagtgatttcagatgtgctgaaaggaggaccagctgaaggacagctacaggaaaatgaccgagttgcaatggttaacggagtttcaatggataatgttgaacatgcttttgctgttcagcaactaaggaaaagtgggaaaaatgcaaaaattacaattagaaggaagaagaaagttcaaataccagtaagtcgtcctgatcctgaaccagtatctgataatgaagaagatagttatgatgaggaaatacatgatccaagaagtggccggagtggtgtggttaacagaaggagtgagaagatttggccgagggatagaagtgcaagtagagagaggagcttgtccccgcggtcagacaggcggtcagtggcttccagccagcctgctaaacctactaaagtcacactggtgaaatcccggaaaaatgaagaatatggtcttcgattggcaagccatatatttgttaaggaaatttcacaagatagtttggcagcaagagatggcaatattcaagaaggtgatgttgtattgaagataaatggtactgtgacagaaaatatgtcattgacagatgcaaagacattgatagaaaggtctaaaggcaaattaaaaatggtagttcaaagagatgaacgggctacgctattgaatgtccctgatctttctgacagcatccactctgctaatgcctctgagagagacgacatttcagaaattcagtcactggcatcagatcattctggtcgatcacacgataggcctccccgccgcagccggtcacgatctcctgaccagcggtcagagccttctgatcattccaggcactcgccgcagcagccaagcaatggcagtctccggagtagagatgaagagagaatttctaaacctggggctgtctcaactcctgtaaagcatgctgatgatcacacacctaaaacagtggaagaagttacagttgaaagaaatgagaaacaaacaccttctcttccagaaccaaagcctgtgtatgcccaagttggcaaccagatgtggatttacctgtcagtccatctgatggtgtcctacctaattcaactcatgaagatgggatttcttcggcccagcatgaaattggtaaaattcagaaaaggagatagtgtgggtttgcggctggctggtggaaatgatgttggaatatttgtagctggcgttctagaagatagccctgcagccaaggaaggcttagaggaaggtgatcaaattctcagggtaaacaacgtagattttacaaatatcataagagaagaagccgtccttttcctgcttgacctccctaaaggagaagaagtgaccatattggctcagaagaagaaggatgtttatcgtcgcattgtagaatcagatgtaggagattctttctatattagaacccattttgaatatgaaaaggaatctccctatggacttagttttaacaaaggagaggtgttccgtgctgtggataccttgtacaatggaaaactgggctcttggcttgctattcgaattggtaaaaatcataaggaggtagaacgaggcatcatccctaataagaacagagctgagcagctagccagtgtacagtatacacttccaaaaacagcaggcggagaccgtgctgacttctggagattcagaggtcttcgcagctccaagagaaatcttcgaaaaagcagagaggatttgtccgctcagcctgttcaaacaaagtttccagcttatgaaagagtggttcttcgagaagctggatttctgaggcctgtaaccatttttggaccaatagctgatgttgccagagaaaagctggcaagagaagaaccagatatttatcaaattgcaaagagtgaaccacgagacgctggaactgaccaacgtagctctggctatattcgcctgcatacaataaagcaaatcatagatcaagacaaacatgctttattagatgtaacaccaaatgcagttgatcgtcttaactatgcccagtggtatccaattgttgtatttcttaaccctgattctaagcaaggagtaaaaacaatgagaatgaggttatgtccagaatctcggaaaagtgccaggaagttatacgagcgatctcataaacttgctaaaaataatcaccatctttttacaactacaattaacttaaattcaatgaatgatggttggtatggtgcgctgaaagaagcagttcaacaacagcaaaaccagctggtatgggtttccgagggaaaggcggatggtgctacaagtgatgaccttgatttgcatgatgatcgtctgtcctacctgtcagctccaggtagtgaatactcaatgtatagcacggacagtagacacacttctgactatgaagacacagacacagaaggcggggcctacactgatcaagaactagatgaaactcttaatgatgaggttgggactccaccggagtctgccattacacggtcctctgagcctgtaagagaggactcctctggaatgcatcatgaaaaccaaacatatcctccttactcaccacaagcgcagccacaaccaattcatagaatagactcccctggatttaagccagcctctcaacagaaagcagaagcttcatctccagtcccttacctttcgcctgaaacaaacccagcatcatcaacctctgctgttaatcataatgtaaatttaactaatgtcagactggaggagcccaccccagctccttccacctcttactcaccacaagctgattctttaagaacaccaagtactgaggcagctcacataatgctaagagatcaagaaccatcattgtcgtcgcatgtagatccaacaaaggtgtatagaaaggatccatatcccgaggaaatgatgaggcagaaccatgttttgaaacagccagccgttagtcacccagggcacaggccagacaaagagcctaatctgacctatgaaccccaactcccatacgtagagaaacaagccagcagagacctcgagcagcccacatacagatacgagtcctcaagctatacggaccagttttctcgaaactatgaacatcgtctgcgatacgaagatcgcgtccccatgtatgaagaacagtggtcatattatgatgacaaacagccctacccatctcggccaccttttgataatcagcactctcaagaccttgactccagacagcatcccgaagagtcctcagaacgagggtactttccacgttttgaagagccagcccctctgtcttacgacagcagaccacgttacgaacaggcacctagagcatccgccctgcggcacgaagagcagccagctcctgggtatgacacacatggtagactcagaccggaagcccagccccacccttcagcagggcccaagcctgcagagtccaagcagtattttgagcaatattcacgcagttacgagcaagtaccaccccaaggatttacctctagagcaggtcattttgagcctctccatggtgctgcagctgtccctccgctgataccttcatctcagcataagccagaagctctgccttcaaacaccaaaccactgcctccacccccaactcaaaccgaagaagaggaagatccagcaatgaagccacagtctgtactcaccagagttaagatgtttgaaaacaaaagatctgcatccttagagaccaagaaggatgtaaatgacactggcagttttaagcctccagaagtagcatctaaaccttcaggtgctcccatcattggtcccaaacccacttctcagaatcaattcagtgaacatgacaaaactctgtacaggatcccagaacctcaaaaacctcaactgaagccacctgaagatattgttcggtccaatcattatgaccctgaagaagatgaagaatattatcgaaaacagctgtcatactttgaccgaagaagttttgagaataagcctcctgcacacattgctgccagccatctctccgagcctgcaaagccagctcattctcagaatcaatcaaatttttctagttattcttcaaagggaaagcctcctgaagctgatggtgtggatagatcatttggcgagaaacgctatgaacccatccaggccactccccctcctcctccattgccctcgcagtatgcccagccatctcagcctgtcaccagcgcgtctctccacatacattctaagggagcacatggtgaaggtaattcagtgtcattggattttcagaattccttagtgtccaaaccagacccacctccatctcagaataagccagcaactttcagaccaccaaaccgagaagatactgctcaggcagctttctatccccagaaaagttttccagataaagccccagttaatggaactgaacagactcagaaaacagtcactccagcatacaatcgattcacaccaaaaccatatacaagttctgcccgaccatttgaacgcaagtttgaaagtcctaaattcaatcacaatcttctgccaagtgaaactgcacataaacctgacttgtcttcaaaaactcccacttctccaaaaactcttgtgaaatcgcacagtttggcacagcctcctgagtttgacagtggagttgaaactttctctatccatgcagagaagcctaaatatcaaataaataatatcagcacagtgcctaaagctattcctgtgagtccttcagctgtggaagaggatgaagatgaagatggtcatactgtggtggccacagcccgaggcatatttaacagcaatgggggcgtgctgagttccatagaaactggtgttagtataattatccctcaaggagccattcccgaaggagttgagcaggaaatctatttcaaggtctgccgggacaacagcatccttccacctttagataaagagaaaggtgaaacactgctgagtcctttggtgatgtgtggtccccatggcctcaagttcctgaagcctgtggagctgcgcttaccacactgtgatcctaaaacctggcaaaacaagtgtcttcccggagatccaaattatctcgttggagcaaactgtgtttctgtccttattgaccacttttaactcttgaaatataggaacttaaataatgtgaaactggattaaacttaatctaaatggaaccactctatcaagtattataccttttttagagttgatactacagtttgttagtatgaggcatttgtttgaactgataaagatgagtgagcatgcccctgaaccatggtcggaaaacatgctacacactgcatgtttgtgattgacgggactgttggtattggctagaggttcaaagatattttgctttgtgatttttgtaatttttttatcgtcactgcttaacttcacatattgatttccgttaaaataccagccagtaaatgggggtgcatttgaggtctgttctttccaaagtacactgtttcaaactttactatggccctggcctagcatacgtacacattttattttattatgcatgaagtaatatgcacacattttttaaatgcacctggaatatataaccagtgttgtggatttaacagaaatgtacagcaaggagatttacaactgggggagggtgaagtgaagacaatgacttactgtacatgaaaacacatttttcttagggaaggatacaaaagcatgtgagactggttccatggcctcttcagatctctaacttcaccatattaccacagacatactaaccagcagaaatgccttaccctcatgttcttaattcttagctcattctccttgtgttactaagtttttatggcttttgtgcattatctagatactgtatcatgacaaagactgagtacgttgtgcatttggtggtttcagaaatgtgttatcacccagaagaaaatagtggtgtgatttggggatatttttttcttttcttttcttttcttttttttttttttttgacaaggggcagtggtggttttctgttctttctggctatgcatttgaaaattttgatgttttaaggatgcttgtacataatgcgtgcataccacttttgttcttggtttgtaaattaacttttataaactttaccttttttatacataaacaagaccacgtttctaaaggctacctttgtattctctcctgtacctcttgagccttgaactttgacctctgcagcaataaagcagcgtttctatgacacatgcaaggtcattttttttaagaaaaaggatgcacagagttgttacatttttaagtgctgcatttaaaagatacagttactcagaattctctagtttgattaaattcttgcaaagtatccctactgtaatttgtgatacaatgctgtgccctaaagtgtatttttttactaatagacaatttattatgacacatcagcacgatttctgtttaaataatacaccactacattctgttaatcattaggtgtgactgaatttcttttgccgttattaaaaatctcaaatttctaaatctccaaaataaaactttttaaaataaaaaaaaat

SEQ ID NO: 28838 - DNA, 4497 bp, Homo Sapiens
ctgcagccttgaactcctgggttcaactgaaggtcctcctacctcagcctgctgagtagctaggaccacaagcacacaccaccgcaactggcttaaattaaaatataaattgtagagatagggtcttaatgtgttgcccaggctgctcttgaactccttgcttcaggtgatcctcccacctcagcctctcaaagtgctgggattatagacctgagccacagcacctggccaactgacctatgattttacacaatggctgctcttcccttctttaactattattcattcttctttgatcctcattatttgactgtagtccttcttatgtcttgttttccttcattacctcttattctatcacattgccattgtcattctccactggggaagctctttcttgctgaagactggaaagacaagtccattcacctgattttctgtaagattgtggctcatgtattgacttgtcagacaattctgaagtttcatcaaaattagctatcatgcttgcataatggccctgaaccctcactcctacacttagcttcagtaccatctatgtcctcaactgtccatgatacttataattcccgtaaatcttcacttaacacctaacatttatttaatcttactaggcaaggtaataagaaatacataggtttgcctccagaagtgggttcttaagaaacccaccagaggaactcctctttcagatgtccacattagaagatttcatatcacatttggtgccacaggcctttgacaaggaggatgcagaggaaaaagcaaacttcacctcttcctagggaaagtgttggcctgccaacaggaaagaggcaacatctgggaaaatccccagtctttgccaggaagagtccatgccaaccccaccccatgacccctgtcctgcctactcattgtcactcttcactccaatgtccctcccccagatcctctataaaatcccactctttcctgaccagacaaaccataccatatcccaccagagaggtaagtgggagctgagagaagatgagacccagggaggagctactgcacatgacacaggagaatacatgggagggtcccttcctcagggagcacaggaactctgagactcagcaagggtgtcctgggagggctcggggatgggagagtacacagattcacaactcattcagaactgtagaagatgatggatgtgaccaagatcactttagtcctaggggactagagaaggaaaatgacatgaggcagtggggtatctgtgtgttctcccactgaccacgctttctttagtgactcctgattgcctcctcaagtcgcagacactatgctgcctcccatggccctgcccagtgtatcttggatgctgctttcctgcctcatgctgctgtctcaggttcaaggtgagattgctttgcctctagcactgggttccctatgaatcctcagagctaacaagaggaggaaggctcctgtgtgtcatgtgaggtaatgacgtggtgtctaatgaacctgcctgcagttcttgcatcatctctccttccttcaggttaacttgcagtgggaggctccatggtggtccactaacagtggaatgagatggcttccatttagtcagtggactctaatatacactggtgggaaagtggactctaatatacactggagggtcagtaatgagatgtggggagggacaatgattggaggacccaatgtagagacagcccagagtgaggagagtattgaatggttgaataaggggaaagggtaataagagactggatggtgctccatttactatggctattttgagataaagaatttctgaaaacataagggaagatgaaggggtgtcaggaatgtggtcttcctccccaaggacattcctaggtattccccaaggtcatctcccaccccaagccccactcttcattttaccctcccctctcttcttccacctcaggtgaagaaccccagagggaactgccctctgcacggatccgctgtcccaaaggctccaaggcctatggctcccactgctatgccttgtttttgtcaccaaaatcctggacagatgcagatgtgagtggttagatgtggtgttggaggtgaccggtctcagggggaggagggtctccattcaggagagttccttgggaatgaggatgaacacgtttatctttcacacagtcctcctcccacctacctttgccctgccctccctcagcaggtctcaggctccctctcattctctttgttgccctcaaagctggcctgccagaagcggccctctggaaacctggtgtctgtgctcagtggggctgagggatccttcgtgtcctccctggtgaagagcattggtaacagctactcatacgtctggattgggctccatgaccccacacaggtgccagtatatcctccctctctgttacctctcaaggtgctattgttgcccaggcccactccctgtcccctgtgcctgcccaggaagtacttcagggagcactggagctcagattctggggaatatttggggggaaagggaaggccatgaagcatctgaagatctgagttctgtggaggtctctatctttcagataaaatcaatctgccttcctcaggcgtattacataattctcatatgaggctgggttaacaattctctgagcttcatggagtctttgcctactattctgaaggaactcttaatgaagataggatcaatttttgtccccatacagaactgacattacttttgaggttcacaagctaatcacaaatgctacatcaattattgttctgcaaataatatattaccttgagttgttccaaaggtcttatgtttattggctggaattttccaatagcaatgaggagtcaaggaagagtttcctactcaccggcagcatctggaatagcagaccaactttcctcatgctggggagcaaatcaggtgttgcagctaaggggccatgcaagaagagctgcaatggccattcccttcacctggctacctcctctactctacagggcaccgagcccaatggagaaggttgggagtggagtagcagtgatgtgatgaattactttgcatgggagagaaatccctccaccatctcaagccccggccactgtgcgagcctgtcgagaagcacaggtaagaaacagaggagctgcctcttcccagtgttttccatctcatcccccattcctgggtctgaccttcaggaaatcttcctgagctagaaaatacaatgttagtgtgtcttctcttatctcctctcttctccactttctttgaatctctctcctggattgggacactggtgaaggtgagggagaggctttaacttctaggctaaaacctgggatgccccttcattggattcacaagcttcctcagccccattccatttatgtcttctgtctctccagcatttctgaggtggaaagattataactgtaatgtgaggttaccctatgtctgcaagttcactgactagtgcaggagggaagtcagcagcctgtgtttggtgtgcaactcatcatgggcatgagaccagtgtgaggactcaccctggaagagaatattcgcttaattcccccaacctgaccacctcattcttatctttcttctgtttcttcctccccgctgtcatttcagtctcttcattttgtcatacggcctaaggctttaaagagcaataaaatttttagtctgcacttgtttgtcttgtatatgccagtgtcatagccatactctgagaaggacaaagtgtttgagtggaggaaactttatgggtcttgcttcttccctattcacccaggcctctagggaaaatgatgaagtgtgcatccctaccagtgtgttatgatgagggtgtgggtcctgctcatgtaggatttgtgttgtggagagatgaggacatttctctcccgcgtacttactgccctcccattcccgtagcccaaacctgacagtgtgacatgaacagattaggaggctctgatggtgcttagaatagtacttctcagagaatggcatcagcaggatggtagataggactttccagctcttgaaccttcacagaaacattcatttgaactactacccattaaaatggaaataccttcacaagagctaacaatcccaagtgagtgattaaagcatctgaatgttgcaaaaaataagaagggatgcatcgaagagggtagaaagaagacttttacattatttatatcacccctccatcaatctcagtaagcacagcatggagagacattccctaaacttggggaaagagagtgaaataagcacttgagttttccatggaccctaacactaggtttgcctcagtaagacccagtggcctctgactccaggcagacacccttggacttagactccaggctgccttgatgccaggccaggctctgtggccccaggctctgtgaccccaggctccaggtcagcccccatgactgcag

SEQ ID NO: 28839 - DNA, 2848 bp, Homo Sapiens
cgcggcactcgcgcgcgatcccggccggcggcgcgccggcgggccaggcggcgccacagcccatggagctcgagaacatcgtagcgaacacggtgctactcaaggcccgggaaggtggcggtggaaatcgcaaaggcaaaagcaagaaatggcggcagatgctccagttccctcacatcagccagtgcgaagagctgcggctcagcctcgagcgtgactatcacagcctgtgcgagcggcacgccattgggcgcctgctgttccgagagttctgtgccacgaggccggagctgagccgctgcgtcgccttcctggatggggtggccgagtatgaagtgaccccggatgacaagcggaaggcatgtgggcggcacgtaacgcagaattttctgagccacacgggtcctgacctcatccctgaggtcccccggcagctggtgacgaactgcacccagcggctggagcagggtccctgcaaagaccttttccaggaactcacccggctgacccacgagtacctgagcgtggccccttttgccgactacctcgacagcatctacttcaaccgtttcctgcagtggaagtggctggaaaggcagccagtgaccaaaaacaccttcaggcaataccgagtcctgggcaaaggtggctttggggaggtgtgcgcctgccaggtgcgggccacaggtaagatgtatgcctgcaagaagctagagaaaaagcggatcaagaagcggaaaggggaggccatggcgctgaacgagaagcagatcctggagaaagtgaacagtaggtttgtagtgagcttggcctacgcctatgagaccaaggacgcgctgtgcctggtgctgacactgatgaacgggggcgacctcaagttccacatctaccacatgggccaggctggcttccccgaagcgcgggccgtcttctacgccgccgagatctgctgtggcctggaggacctgcaccgggagcgcatcgtgtacagggacctgaagcccgagaacatcttgctggatgaccacggccacatccgcatctctgacctgggactagctgtgcatgtgcccgagggccagaccatcaaagggcgtgtgggcaccgtgggttacatggctccggaggtggtgaagaatgaacggtacacgttcagccctgactggtgggcgctcggctgcctcctgtacgagatgatcgcaggccagtcgcccttccagcagaggaagaagaagatcaagcgggaggaggtggagcggctggtgaaggaggtccccgaggagtattccgagcgcttttccccgcaggcccgctcactttgctcacagctcctctgcaaggaccctgccgaacgcctggggtgtcgtgggggcagtgcccgcgaggtgaaggagcaccccctctttaagaagctgaacttcaagcggctgggagctggcatgctggagccgccgttcaagcctgacccccaggccatttactgcaaggatgttctggacattgaacagttctctacggtcaagggcgtggagctggagcctaccgaccaggacttctaccagaagtttgccacaggcagtgtgcccatcccctggcagaacgagatggtggagaccgagtgcttccaagagctgaatgtctttgggctggatggctcagttcccccagacctggactggaagggccagccacctgcacctcctaaaaagggactgctgcagagactcttcagtcgccaagattgctgtggaaactgcagcgacagcgaggaagagctccccacccgcctctagcccccagcccgaggcccccaccagcagttggcggtagcagctactccgagcgccgtttacagttttgcacagtgatcttccccattgtccactcaagtcgtggcctggggaacacagacggagctgtccccagtgtcctccgtccctcagcccctggcctggctgagtttggcagggcctgggccatccctgggacaaaggtgcgtcccttcagctcttctccgtggagctcggggctttctgtatttatgtatttgtacgaatgtatatagcgaccagagcattcttaattcccgccgcagacctggcgcccccgccttggctcctgggggcagccagccctggctggagagcgggacgtggcagaggagccactgccaaactcaaggctcctctggcccagcttggatggctgagggtggtcacacctgagccttcagcactgtgctgccaccccggcctctgagtaagactcgtgcctccccctgctgccctgggctcaggctgctacctctggggcccaaagctgtcccttctcagtgcttgtcagcgctgggtctggggcctctgtatgccctaggcctgtgccaaagtggccagagattgggctgcctgtgatacccatcagcccactgccccggccggcccagataggtctgcctctgccttccagctcccacagcctggtccctgatactgggctctgtcctgcagacacctctttcagaaacgcccaagcccagccctaggagggggtggggcatccctggtcaaccctcaaacattccggactcccctcataacaatagacacatgtgcccagcaataatccgccccttcctgtgtgcgcctgtggggtgcgtgctctctgtgtgtacctgtgtgggtgaaggggatagggcgaggctgtgcctgtgccccaggtcccagccctggcccttcccagactgtgatggccatcctggtcccagtgttagggtagcatgggattacagggccctgttttttccatatttaaagccaatttttattactcgttttgtccaacgtaaaag

SEQ ID NO: 28840 - DNA, 1733 bp, Homo Sapiens
tgatttcctctgggcaggagggagccacggccagcgcgtgtcacacttcatggctcttactccacctctcttgctcctctctgcagggaccatgaccttgggctcccccaggaaaggccttctgatgctgctgatggccttggtgacccagggagaccctgtgaagccgtctcggggcccgctggtgacctgcacgtgtgagagcccacattgcaaggggcctacctgccggggggcctggtgcacagtagtgctggtgcgggaggaggggaggcacccccaggaacatcggggctgcgggaacttgcacagggagctctgcagggggcgccccaccgagttcgtcaaccactactgctgcgacagccacctctgcaaccacaacgtgtccctggtgctggaggccacccaacctccttcggagcagccgggaacagatggccagctggccctgatcctgggccccgtgctggccttgctggccctggtggccctgggtgtcctgggcctgtggcatgtccgacggaggcaggagaagcagcgtggcctgcacagcgagctgggagagtccagtctcatcctgaaagcatctgagcagggcgacagcatgttgggggacctcctggacagtgactgcaccacagggagtggctcagggctccccttcctggtgcagaggacagtggcacggcaggttgccttggtggagtgtgtgggaaaaggccgctatggcgaagtgtggcggggcttgtggcacggtgagagtgtggccgtcaagatcttctcctcgagggatgaacagtcctggttccgggagactgagatctataacacagtgttgctcagacacgacaacatcctaggcttcatcgcctcagacatgacctcccgcaactcgagcacgcagctgtggctcatcacgcactaccacgagcacggctccctctacgactttctgcagagacagacgctggagccccatctggctctgaggctagctgtgtccgcggcatgcggcctggcgcacctgcacgtggagatcttcggtacacagggcaaaccagccattgcccaccgcgacttcaagagccgcaatgtgctggtcaagagcaacctgcagtgttgcatcgccgacctgggcctggctgtgatgcactcacagggcagcgattacctggacatcggcaacaacccgagagtgggcaccaagcggtacatggcacccgaggtgctggacgagcagatccgcacggactgctttgagtcctacaagtggactgacatctgggcctttggcctggtgctgtgggagattgcccgccggaccatcgtgaatggcatcgtggaggactatagaccacccttctatgatgtggtgcccaatgaccccagctttgaggacatgaagaaggtggtgtgtgtggatcagcagacccccaccatccctaaccggctggctgcagacccggtcctctcaggcctagctcagatgatgcgggagtgctggtacccaaacccctctgcccgactcaccgcgctgcggatcaagaagacactacaaaaaattagcaacagtccagagaagcctaaagtgattcaatagcccaggagcacctgattcctttctgcctgcagggggctgggggggtggggggcagcggatggtgcctatctgggtagaggtagtgtgagtgtgtgtgtgctgggatggcagctgcgcctgctgctcgccc

SEQ ID NO: 28841 - DNA, 3264 bp, Homo Sapiens
gccggaagtgacgcagggcagcggcgtcgcgggggcggggctcgggaaagacccgtgccagcgggcgtgtggccgcgggtttcgcacggtccaataagggagggcggcgtggcccggcctggtagcgacgaggacgcgcctgcgcagaggcggcagcaccaccggggttgactccgggggcgcggcgaggaggtgagcgggggccacagcccgggctggggggagccggggtgcaagagggcaggctggatcaggccgggcagaagcggaccgggctccgagtgtcaacgagagctaggtgacgaggaaattgggggtgggggccggagctgtccggagatgccgcaggggagggttctcacgccgcacggggcggagtcctgggactcggggcgggacgtggaaccgggacggtgggacctccgagctggtgccagtggaaggcggagcccggcggcggggggcggagctaggagggtcgggggacggagcctggctcttgaaggaggagctggaggaggtgaaaggcggagcctcggggtcggaagcagagggggacggagcggaggcgctgggggcgggcttcagccggtgagtggcgtggctacggctccggaaaaggggtctagttctgtcgaaggcggggctgcaggcccgggggcggtaccgcgtcctccgaagggcggtgccaaggagccaagtgaggagcctggcccgagtaatggccccgggcgtcctcgcgggggtggtctccgtggtggccgggcttggggacgccgtaggccgagaactccaccgggagaggtggtgtgggtggagcgggctcggcggccagcagacacagggccagtctgggtgccccggagacccccaagggctcagagttggggcggcgccccgggcggaagcacagggccaggctggggggtatctcccgaggacccgggctcctcggagccacccagtggggatgtgtgggtgcctcggggccggccccctgcagcggccgcagaggtgttggtgtgctggaccgggggcagctgggtgtggcgtgagtggggccgcccagtcggggcaactgcagtgcagccagatagggtctggactttgcgtaaagggacaggcgggaactgaagagcggaggtggggactgggagggagggaaggtatgggggtgagcaaaggggcgggtccctggctgctgtggcctcccctgaccccctccccccgctgctggggtcctcgccaagcccccttctcactggactggtaagtgtggccggagcccgggggagagggcggtgacccgggacaaaggggatcccccggggcaaggaagatacagtggcggtggaaccctcctgttacctacccgtgttccatactctccctgccctcccccacgttcagtcggtcggtcggggtctgtgcccacagagacatgaggctgagctggttccgggtcctgacagtactgtccatctgcctgagcgccgtggccacggccacgggggccgagggcaaaaggaagctgcagatcggggtcaagaagcgggtggaccactgtcccatcaaatcgcgcaaaggggatgtcctgcacatgcactacacggtgagtgggttgggcgggccttttgggagtgggtggggcttccgaggaccagagggtgcttgggagtctggttctccataagccaggtaggtgaccttgggcaagtcccctctcgcctctaagccagtttccatggttctgccttgcccttgcctactgcccaggtgggcaccagcaggcagtgacagtgtactgtgagctgcccaaggctctgtcctcttaaagaactatgaccagctgggcgcagtggctcacccctgtaatcccagcactttgggaggccgaggcgggtggatcacctgaggtcaggaatttgagaccagtttggcctcatgatgaaactttctctgctaaaaatacaaaattagccaggcgtggtgcgggcgcctataatcccagctacttgggaggctgaggtggaagaattgcttgaacccgggaggcagaggctgcagggaggcgagatcacgccgctgcactccagccatggcaacagagactccatctcaaaaaacaaaaaggactgaccaccagggctgtgggtggggcgtgggggggcagcttgatggggaaagcagctgagggagggggtgtcaggggtggtcccctcttcctcactggccttctcatggttccacaggggaagctggaagatgggacagagtttgacagcagcctgccccagaaccagccctttgtcttctcccttggcacaggccaggtcatcaagggctgggaccaggggctgctggggtgagtcatgggggaatgggcttgggagtgggggcgtgcatggccaccgccaggaggtaagctgtgggaggcaagcccagggatacaagacaagggccctgggtgctgccatgggctgagcatgtgtcttcctgcaggatgtgtgagggggaaaagcgcaagctggtgatcccatccgagctaggtaagaggcccctcctgagggtgcagagcgagtttggggtgtgtgactgggaagggtgaaagctgcttcagcttttcattggtcttcaccgtatccattcattacaatacatgcctcctccaagtttggctgtgtctagcagtgagtacagggcaagatcattgaagcactcagctgtagtggccccactctgcccttgccaggcctttggcacccccttcccatctccattacccttctccatttctggccttcttgctgagaggggcggaacactctccctttgcccacactggaagggagcttggccatcactgactgtttctttgtgcatcttcaacagggtatggagagcggggagctcccccaaagattccaggtagtaaaccttttgatacctcccatcacctgcagccagcccacctccctgtggccctggttggcattttgactccccttctcccctacaggcggtgcaaccctggtgttcgaggtggagctgctcaaaatagagcgacgaactgagctgtaaccagactggggaggggcagggggagaggcccccatcagggaccagactgttccaaaaaaaaaacaaaaaacaaaaacaaacaaaaaaacacttaaaagcccaaggagtaagcctgtgtgtttgtgggccctgagagactcagagacctcagctccagcataccccaccaccttctcctttccc

SEQ ID NO: 28842 - DNA, 2894 bp, Homo Sapiens
ggagaccgcgtctgcttcaacttgggccgtgagctctatttctacccaggctgctgtcgtcgtgggagccaacggtccattgacctcaacaagccaattgacaagcggatctacaagggcacccagcccacctgccacgatttcaaccagttcactgctgccaccgagaccatctcgctgctggtgggcttctcagcgggtcaagtgcagtacctggatctcatcaaaaaggacaccagcaagctgttcaatgaggagcggttgatcgacaagaccaaggtgacatatctgaagtggctgcctgagtcggagagcctgttcctggcatcacacgccagtggccacctgtacctgtacaacgtcagccacccctgcgcctcggccccgccccagtacagcctgctgaagcagggcgagggcttctctgtctatgctgccaagagcaaggcaccccgcaacccgctggccaagtgggcggtgggtgagggtcccctcaacgagttcgccttctcgcccgatggccggcacctggcctgtgtgagccaggatgcgtgcctgcgcgtcttccacttcgactccatgctcctgcgtgggctcatgaagagctactttgggggcctgctgtgtgtgtgctggagccctgacggccgctacgtggtgacgggtggcgaagatgacctggtcaccgtgtggtccttcaccgagggccgcgtggtggctcgaggccatggccacaagtcctgggtcaacgctgtggcctttgactctctctacaccacaagggcagaggaggcggcgacagcagccggtgctgatggggagcggagcggcgaagaggaggaggaggagcccgaggctgcgggcacaggctcggccgggggcgccccactctctccactgcccaaggctggctccattacttaccgctttggctcggcgggccaggacacgcagttctgcctgtgggacctcactgaagacgtgctctacccgcacccgcccctggcccgcacccgcaccctccctggcacacctggcaccacgccaccggccgccagcagctcgaggggtggcgagcctggcccaggccccctgcctcgctcgctgtcccgctccaacagtctcccgcacccagctggcgggggcaaggcgggcggcccgggtgtggcggcagagcctggcacaccattcagcattggccgcttcgccacgctcacactgcaggagcggcgggaccggggggcagagaaggagcacaagcgctaccacagcctgggcaacatcagccggggtggcagtggcggcagtggcagtggtggggagaagcccagcggccctgttccccgcagccgcctggaccccgccaaggtgctgggcactgcgctgtgcccgcgcatccacgaggtgcccctgctggagccccttgtgtgcaagaagatcgcccaggagcggctcacagtcctcctgttcctggaggactgcatcatcactgcctgccaggagggcctcatctgcacctggccgcggccgggcaaggcgttcacagacgaggagaccgaggcccagacaggggaaggaagttggcccaggtcacccagcaagtcagtggtagagggcatctcctcccaaccaggcaactccccgagtggcacagtggtgtgaagccatggatatcgggcccccccaaccccatgcccccagcctcctagccataaccctccctgctgacctcacagatcaacgtattaacaagactaaccatgatggatggactgctccagtccccccacctgcacaaaatttgggggccccccagactggcccggacacgggcgatgtaatagcccttgtggcctcagccttgtcccccacccactgccaagtacaatgacctcttcctctgaaacatcagtgttaccctcatccctgtccccagcatgtgactggtcactcctggggagagactccccgcccctgccacaagagccccaggtctgcagtgtgcccctcagttgagtgggcagggcgggggtggtccagccctcgcccggcccccaccccagctgcccttgctattgtctgtgcttttgaagagtgttaaattatggaagcccctcaggttcctccctgtcccgcaggacctcttatttatactaaagttccctgttttctcagcgggtctgtccccttcggaggagatgatgtagaggacctgtgtgtgtactctgtggttctaggcagtccgctttccccagaggaggagtgcaggcctgctcccagcccagcgcctcccaccccttttcatagcaggaaaagccggagcccagggagggaacggacctgcgagtcacacaactggtgacccacaccagcggctggagcaggaccctcttggggagaagagcatcctgcccgcagccagggcccctcatcaaagtcctcggtgttttttaaattatcagaactgcccaggaccacgtttcccaggccctgcccagctgggactcctcggtccttgcctcctagtttctcaggcctggccctctcaaggcccaggcaccccaggccggttggaggccccgacttccactctggagaaccgtccaccctggaaagaagagctcagattcctcttggctctcggagccgcagggagtgtgtcttcccgcgccaccctccaccccccgaaatgtttctgtttctaatcccagcctgggcaggaatgtggctccccgccaggggccaaggagctattttggggtctcgtttgcccagggagggcttggctccaccactttcctcccccagcctttgggcagcaggtcacccctgttcaggctctgagggtgccccctcctggtcctgtcctcaccaccccttccccacctcctggg

SEQ ID NO: 28843 - DNA, 5228 bp, Homo Sapiens
cacggcccagacccaggattctttatagacggcccaggctcctcctccgcccgggccgcctcacctgcgggcattgcgcgccgcctccgccggtgtagacggcacctgcgccgccttgctcgcgggtctccgccctcgcccaccctcactgcgccaggcccaggcagctcacctgtactggcgcgggctgcggaagctgcgtgacgcgaggcgttgaggcgcggcgcccacgccactgtcccgagaggacgcaggtggagcgggcgcgacttcgcgaacccggcgccggccgccgcagtggtcccagcctacaccgggttccggggacccggccgccagtgcccggggagtagccgccgccgtcggctgggcaccatgaacagcagcagcgccaacatcacctacgccagtcgcaagcggcggaagccggtgcagaaaacagtaaagccaatcccagctgaaggaatcaagtcaaatccttccaagcggcatagagaccgacttaatacagagttggaccgtttggctagcctgctgcctttcccacaagatgttattaataagttggacaaactttcagttcttaggctcagcgtcagttacctgagagccaagagcttctttgatgttgcattaaaatcctcccctactgaaagaaacggaggccaggataactgtagagcagcaaatttcagagaaggcctgaacttacaagaaggagaattcttattacaggctctgaatggctttgtattagttgtcactacagatgctttggtcttttatgcttcttctactatacaagattatctagggtttcagcagtctgatgtcatacatcagagtgtatatgaacttatccataccgaagaccgagctgaatttcagcgtcagctacactgggcattaaatccttctcagtgtacagagtctggacaaggaattgaagaagccactggtctcccccagacagtagtctgttataacccagaccagattcctccagaaaactctcctttaatggagaggtgcttcatatgtcgtctaaggtgtctgctggataattcatctggttttctggcaatgaatttccaagggaagttaaagtatcttcatggacagaaaaagaaagggaaagatggatcaatacttccacctcagttggctttgtttgcgatagctactccacttcagccaccatccatacttgaaatccggaccaaaaattttatctttagaaccaaacacaaactagacttcacacctattggttgtgatgccaaaggaagaattgttttaggatatactgaagcagagctgtgcacgagaggctcaggttatcagtttattcatgcagctgatatgctttattgtgccgagtcccatatccgaatgattaagactggagaaagtggcatgatagttttccggcttcttacaaaaaacaaccgatggacttgggtccagtctaatgcacgcctgctttataaaaatggaagaccagattatatcattgtaactcagagaccactaacagatgaggaaggaacagagcatttacgaaaacgaaatacgaagttgccttttatgtttaccactggagaagctgtgttgtatgaggcaaccaacccttttcctgccataatggatcccttaccactaaggactaaaaatggcactagtggaaaagactctgctaccacatccactctaagcaaggactctctcaatcctagttccctcctggctgccatgatgcaacaagatgagtctatttatctctatcctgcttcaagtacttcaagtactgcaccttttgaaaacaactttttcaacgaatctatgaatgaatgcagaaattggcaagataatactgcaccgatgggaaatgatactatcctgaaacatgagcaaattgaccagcctcaggatgtgaactcatttgctggaggtcacccagggctctttcaagatagtaaaaacagtgacttgtacagcataatgaaaaacctaggcattgattttgaagacatcagacacatgcagaatgaaaaatttttcagaaatgatttttctggtgaggttgacttcagagacattgacttaacggatgaaatcctgacgtatgtccaagattctttaagtaagtctcccttcataccttcagattatcaacagcaacagtccttggctctgaactcaagctgtatggtacaggaacacctacatctagaacagcaacagcaacatcaccaaaagcaagtagtagtggagccacagcaacagctgtgtcagaagatgaagcacatgcaagttaatggcatgtttgaaaattggaactctaaccaattcgtgcctttcaattgtccacagcaagacccacaacaatataatgtctttacagacttacatgggatcagtcaagagttcccctacaaatctgaaatggattctatgccttatacacagaactttatttcctgtaatcagcctgtattaccacaacattccaaatgtacagagctggactaccctatggggagttttgaaccatccccataccccactacttctagtttagaagattttgtcacttgtttacaacttcctgaaaaccaaaagcatggattaaatccacagtcagccataataactcctcagacatgttatgctggggccgtgtcgatgtatcagtgccagccagaacctcagcacacccacgtgggtcagatgcagtacaatccagtactgccaggccaacaggcatttttaaacaagtttcagaatggagttttaaatgaaacatatccagctgaattaaataacataaataacactcagactaccacacatcttcagccacttcatcatccgtcagaagccagaccttttcctgatttgacatccagtggattcctgtaattccaagcccaattttgaccctggtttttggattaaattagtttgtgaaggattatggaaaaataaaactgtcactgttggacgtcagcaagttcacatggaggcattgatgcatgctattcacaattattccaaaccaaattttaatttttgcttttagaaaagggagtttaaaaatggtatcaaaattacatatactacagtcaagatagaaagggtgctgccacggagtggtgaggtaccgtctacatttcacattattctgggcaccacaaaatatacaaaactttatcagggaaactaagattcttttaaattagaaaatattctctatttgaattatttctgtcacagtaaaaataaaatactttgagttttgagctactggattcttattagttccccaaatacaaagttagagaactaaactagtttttcctatcatgttaacctctgcttttatctcagatgttaaaataaatggtttggtgctttttataaaaagataatctcagtgctttcctccttcactgtttcatctaagtgcctcacatttttttctacctataacactctaggatgtatattttatataaagtattctttttcttttttaaattaatatctttctgcacacaaatattatttgtgtttcctaaatccaaccaattttcattaattcaggcatattttaactccactgcttacctactttcttcaggtaaaagggcaaataatgatcgaaaaaataattatttattacataatttagttgtttctagactataaatgttgctatgtgccttatgttgaaaaaatttaaaagtaaaatgtctttccaaattatttcttaattattataaaaatattaagacaatagcacttaaattcctcaacagtgttttcagaagaaataaatataccactctttacctttattgatatctccatgatgatagttgaatgttgcaatgtgaaaaatctgctgttaactgcaaccttgtttattaaattgcaagaagctttatttctagctttttaattaagcaaagcacccatttcaatgtgtataaattgtctttaaaaactgttttagacctataatccttgataatatattgtgttgactttataaatttcgcttcttagaacagtggaaactatgtgtttttctcatatttgaggagtgttaagattgcagatagcaaggtttggtgcaaagtattgtaatgagtgaattgaatggtgcattgtatagatataatgaacaaaattatttgtaagatatttgcagtttttcattttaaaaagtccataccttatatatgcacttaatttgttggggctttacatactttatcaatgtgtctttctaagaaatcaagtaatgaatccaactgcttaaagttggtattaataaaaagacaaccacatagttcgtttaccttcaaactttaggtttttttaatgatatactgatcttcattaccaataggcaaattaatcaccctaccaactttactgtcctaacatggactttcaaaaagaaaaaatgacaccatcttttattctttttttttttttttttttgagagagagtcttactctgccgcccaaactggagtgcagtggcacaatcttggctcactgcaacctctacctcctgggttcaagtgattctcttgcctcagcctcccgagttgctgggattgcgggcatggtggcgtgagcctgtagtcctagctactcgggaggctgaggcaggagaatagcctgaacctgggaatcggaggttgcagggccaagatcgccccactgcactccagcctggcaatagaccgagctccgtctccaaaaaaaaaaatacaatttttatttcttttactttttttagtaagttaatgtatataaaaatggcttcggacaaaatatctctgagttctgtgtattttcagtcaaaactttaaacctgtagaatcaatttaagtgttgaaaaaaatttgtctgaaacatttcataatttgtttccagcatgaggtatctaaggatttagaccagaggtctagattaatactctatttttacatttaaaccttttattataagtcttacataaaccatttttgttactctcttccacatgttactggataaattgtttagtggaaaataggctttttaatcatgaatatgatgacaatcagttatacagttataaaattaaaagtttgaaaagcaatattgtatatttttatctatataaaataactaaaatgtatctaagaataataaaatcacgttaaacc

SEQ ID NO: 28844 - DNA, 8240 bp, Homo Sapiens
aggcggctcaagatggcggctcccagggcctcccgcccgagcttgtaagcgggagcgcccggacaagtagtcggggcgacgggactcagcggcctccagcttcttgagcctaggcgctcgacagtttcgggcggctcttgcggagacggggtgagcgagaagaaagggaagagccaaagggaaggagggcagttaagatggcggcctccatggagtcgtctaccgctgtgtgagaaaccgcttctccgtgagagctgccttagacgaaagggggtgtgtgaaaggaattgaggggctcccttcccgcttgttgacttctccccaccgcaccctttcccggaactatggcttcggccgtgtcgcccgccaacttgccagcggtgcttctgcagccccgctggaagcgagtggtgggctggtcgggtccggtgccacggccccgccacggccaccgcgccgtggccatcaaggagctcatcgtggtgtttggcggcggcaacgagggaatagtggacgaactgcacgtgtacaacacggcaaccaaccagtggttcatcccagccgtgaggggggacattccccctgggtgtgcagcctatggcttcgtgtgtgacgggactcgcctcctggtgtttggtgggatggtggagtatgggaaatacagcaatgacctctacgaactccaggcgagccggtgggagtggaagagactcaaagcaaagacgcccaaaaacgggccccctccgtgtcctcgactcgggcacagcttctcccttgtgggcaacaaatgctacctgtttgggggtctggccaatgatagcgaggacccaaagaacaacattccaaggtacctgaatgacttatatatcctggaattacggccaggctctggagtggtagcctgggacattcccatcacttacggggtcctaccaccaccccgggagtcacatactgccgtggtctacaccgaaaaagacaataagaagtccaagctggtgatctacggcgggatgagtggctgcaggctgggggacctgtggaccctagatattgacaccctgacgtggaataagcccagtctcagcggggtggcgcctcttcctcgcagtctccactcggcaaccaccatcggaaataaaatgtacgtgtttggtggctgggtgcctctcgtcatggatgacgtcaaagtggccacacacgagaaggagtggaagtgtaccaacacgctggcttgtctcaacctggataccatggcctgggagaccatcctgatggatacactggaggacaacatcccccgtgctcgggctggccactgcgcagtcgccatcaacacccgcctgtacatttggagtgggcgtgacggctaccgcaaggcctggaacaaccaggtctgctgcaaggacctctggtacctagagacagaaaagccaccacccccagcccgagtacaactggtacgcgccaacaccaactccctggaggtgagctggggggcagtggcaacagccgacagctaccttctccagctccagaaatatgacattcctgccacggctgctactgccacctcccctacacccaatccggtcccatctgtgcctgccaaccctcccaagagccctgccccagcagcagccgcacctgctgtgcagccgctgacccaagtaggcatcacgctcctgccccaggctgcccccgcacccccgaccaccaccaccatccaggtcttgccaacggtgcctggcagctccatttctgtgcccaccgcagccaggactcaaggtgtccctgctgttctcaaagtgaccggtcctcaggctacaacaggaactccattggtcaccatgcgacctgccagccaggctgggaaagcccctgtcaccgtgacctcccttcccgccggagtgcggatggttgtgccaacacagagtgcccagggaacggtgattggcagtagcccacagatgagtgggatggccgcactggccgctgcggccgctgccacccagaagatccccccttcctcggcacccacggtgctgagtgtcccagcgggtaccaccatcgtgaagaccatggctgtgacacctggcactaccaccctcccagccactgtgaaggtggcctcctcgccagtcatggtgagcaaccctgccactcgcatgctgaagactgcagccgcccaggtggggacatcggtttcctccgccaccaacacgtctacccgccctatcatcacagtgcacaagtcaggcactgtgacagtggcccagcaagcccaggtggtgaccacagttgtgggcggggtcaccaagaccatcaccctggtgaagagccccatctctgtcccaggaggcagtgctctgatttccaatctgggcaaagtgatgtcggtggtccagaccaaaccagttcagacttcagcagtcacaggccaggcgtccacgggtcctgtgactcagatcatccagaccaaagggcccctgccagcgggaacaatcctgaagctggtgacctcagcagatggcaagcccaccaccatcatcactaccacgcaggccagtggggcggggaccaagcccaccatcctgggcatcagcagcgtctcccccagtaccaccaagcccggcacgaccaccatcatcaaaaccatccccatgtcggccatcatcacccaggcgggcgccacgggtgtgaccagcagtcctggcatcaagtcccccatcaccatcatcaccaccaaggtgatgacttcaggaactggagcacctgcgaaaatcatcactgctgtccccaaaattgccactggccacgggcagcagggagtgacccaggtggtgcttaagggggccccgggacagccaggcaccatcctccgcactgtgcccatggggggtgttcgcctggtcacacccgtcaccgtctccgccgtcaagccagccgtcaccacgttggttgtgaaaggcaccacaggtgtcacgaccctaggcacagtgacaggcaccgtctccaccagccttgccggggcggggggccacagcactagtgcttccctggccacgcccatcaccaccttgggcaccattgccaccctctcaagccaggtgatcaaccccactgccatcactgtgtcggccgcacagaccacgctgacagcggcaggcgggctcacaaccccaaccatcaccatgcagcccgtgtcccagcccacccaggtaactctgatcacggcacctagtggggtggaggcccagcctgtgcatgacctccctgtgtccattctggcctccccgactacagaacagcccaccgccacagttaccatcgccgactcaggccagggtgatgtgcagcctggcactgtcaccttggtgtgctccaacccaccctgtgagacccacgagactggcaccaccaacacggccaccactactgttgtggctaaccttgggggacacccccagcccacccaagtgcagttcgtctgtgacagacaggaggcagctgcttctcttgtgacctcgactgtgggccagcagaatggtagcgtggtccgagtctgttcgaacccgccctgcgagacccacgagacgggcaccaccaacaccgccaccaccgccacctccaacatggccgggcagcatggctgctcaaacccaccctgcgagacccacgagacgggcaccaccaacactgccactacagccatgtcgagcgtcggcgccaaccaccagcgagatgcccgtcgggcctgtgcagctggcacccctgccgtgatccggatcagtgtggccactggggcgctggaggcagcccagggctctaagtcccagtgccaaacccgccagaccagcgcgaccagcaccaccatgactgtgatggccaccggggccccgtgctcggccggcccactccttgggccgagcatggcacgggagcccgggggccgcagccctgcttttgtgcagttggcccctctgagcagcaaagtcaggctgagcagcccaagcattaaggaccttcctgcggggcgccacagccatgcggtcagcaccgctgccatgacccgttccagcgtgggtgctggggagccccgcatggcacctgtgtgcgagagcctccagggtggctcgcccagcaccacagtgactgtgacagccctggaggcactgctgtgcccctcggccaccgtgacccaagtctgctccaacccaccatgtgagacccacgagacaggcaccaccaacaccgccactacctcgaatgcaggcagcgcccagagggtgtgctccaacccgccatgcgagacccacgagacgggcaccacccacacggccaccaccgctacttcaaacgggggcacgggccagcccgagggtgggcagcagccccctgctggtcgcccctgtgagacacaccagaccacttccactggcaccaccatgtcggtcagcgtgggtgccctgcttcccgacgccacttcttcccacaggaccgtggagtctggcctagaggtggcggcggcacccagcgtcaccccccaggctggcaccgcgctgctggctcctttcccaacacagagggtgtgctccaaccccccctgtgagacccacgagacgggcaccactcacacggccaccactgtcacttccaacatgagttcaaaccaagaccccccacctgctgccagcgatcagggagaggtggagagcacccagggcgacagcgtgaacatcaccagctccagtgccatcacgacaaccgtgtcctccacactgacgcgggctgtgaccaccgtgacgcagtccacaccggtcccgggcccctctgtgccgcccccagaggaactccaggtgtcgccaggtcctcgccagcagctgccgccacggcagcttctgcagtcggcttccacagccctgatgggggagtccgccgaggtcctgtcagcctcccagacccctgagctcccggccgccgtggatctgagcagcacaggggagccatcttcgggccaggagtctgccggctctgcggtggtggccactgtggtggtccagccacccccacccacacagtccgaagtagaccagttatcacttccccaagagctaatggccgaggcccaagctggcaccaccaccctcatggtaacggggctcacccccgaggagctggcagtgacggctgctgcagaagcagctgcccaggccgcagccacggaggaagcccaggccctggccatccaggcggtgctccaggccgcgcagcaggccgtcatgggcaccggcgagcccatggacacctccgaggcagcagcaaccgtgactcaggcggagctggggcacctgtcggccgagggtcaggagggccaggccaccaccatacccattgtgctgacacagcaggagctggctgccctggtgcagcagcagcagctgcaggaggcccaggcccagcagcagcatcaccacctccccactgaggccctggcccctgccgacagtctcaacgacccagccattgagagcaattgcctcaatgagctggccggcacggtccccagcactgtggcgctgctgccctcaacggccactgagagcctggctccatccaacacatttgtggccccccagccggttgtggtggccagcccagccaagctgcaggctgcagctaccctgaccgaagtggccaatggcatcgagtccctgggtgtgaagccagacctgccgcccccacccagcaaagcccccatgaagaaggaaaaccagtggtttgatgtgggagtcattaagggcaccaatgtaatggtgacacactatttcctgccaccagatgatgctgtcccatcagacgatgatttgggcaccgtccctgactataaccagctgaagaagcaggagctgcagccaggcacagcctataagtttcgtgttgccggaatcaatgcctgtggccgggggcccttcagcgaaatctcagcctttaagacgtgcctgcctggtttcccaggggccccttgtgccattaaaatcagcaaaagtccggatggtgctcacctcacctgggagccaccctctgtgacctccggcaagattatcgagtactccgtgtacctggccatccagagctcacaggctgggggcgagctcaagagctccaccccggcccagctggccttcatgcgggtgtactgtgggcccagcccctcctgcctggtgcagtcctccagcctttccaacgcccacatcgactacaccaccaagcccgccatcatcttccgcatcgccgcccgcaatgagaagggctatggcccggccacacaagtgaggtggctgcaggaaaccagtaaagacagctctggcaccaagccagccaacaagcggcccatgtcctctccagaaatgaaatctgctccaaagaaatctaaggccgatggtcagtgagaggaagctgactagcccctggattcttctccagacccccctgcttcaggaacacccgccagggcccacccctcccaccccgtcccagcattcgcacttcaccctcgcgagccgctgttcactcctctcccctttctctttctctctgtttttaaaataatctaaagaaagcacattttaccattgctgttgggaggaagcagaggcagatgggaaagcagagagaggagcgcgcttcctttcctccccgctgccgcccaccctggggagagacttttgcggggagggaaggcggagctgaggacagccagctccgccctcccaaggctgtgcgttcctgagggccaggtcgggggcaggcatggaggggaggaaaggcgtccctcttggccctccccagagtggctttcctggcaccctggcctgggtgtctggttctgttttcttttcttccccttgtgtttccagtcacctaacttcccttcctcaggctcccccggcccaccctgctcagtgaccccacaggaagcttacacattttctcagaggcctttgtgctcccacctcttctaccctccccctcttctttcccattttaaaaaagaaaagaaggaaaaagaaaaaaggggcaaggagccccgcggcggcctgggcagcgcctgtgcagacctccctgcaggccgcactgccaactgctgcatttgttgtgttttttaggttgcaattggtgaagttcacactttcattgtaattttagcgtgtggggttttgtcccttttttgttgttgttagctgtgtacagaatgtgtaatcttttttcttttctcttttttttgttttgttttgttttgtttttgtttttttacttttttcttcttggctaattcttggcagggatctttctggaggaaaagctggggccagccagggcaggagaggtgtgaaatctgccacgaggggcctgctgtttgccacccagcccaacttcctgttgctggcccctgccctctgcccttttgcctgtcctcaggccgctggaacaaaggaaggacagctcattcctcatgggcgatcactccgcatctatagggtcgagcctaggggagcttgagggagggctggggcctccttgtcctggatttccagctctccccatcccccctccctgagcaccaccggcaccgcctcccaaacagggctgctggtttccgcagccactgctccacctcccccaaatcgtcatggaaagggtggagaatggaggggaaccaggcgtccttggaggcagcttgggagggtgactgtgtagtgtcacccacaagggaggctagggcaatggagcaggccaccagcagcagctgtgcagcatggaactcaggccaggctccgaggctgggggatctgcttggagttttctgccccccaccccaaacttctgtcgaggagcaaggcttgccagcaagtcagaaggatttgaaccgagcagccaatctttccagccctcccctaccgacctctgcctggagacgcagcagcctgtgtcctccagggcctctggtttgttgtattatagtatatttcgctgtggaaaatgtcacgtttagtcaccttggagcccactcacctggtcctgttgttttaccccatcccttctctcgcgcgcctattgatttgtttctgaggagagtacaccgttcactattgtagagtaacccctgtgactcaatattaccatagtgcgatgtcgttttgtgctattttgaacaattaaaagactttttttgaaat

SEQ ID NO: 28845 - DNA, 3698 bp, Homo Sapiens
tggatcgctatggcagcggcgtcgtcgcgggccgggccccagcaatcccgcccgggcccggctgcctcaacagccgcccccactgccccctctcgggcatgaaccgagcttcttgttgccgcccgctgccctacccgccgctgccgccgcatcccgactctgggccagcgctgggaacatgcccctggccgcctactgctacctgcgggtcgtgggcaaggggagctatggagaggtgacgcttgtgaagcaccggcgggacggcaagcagtatgtcatcaaaaaactgaacctccgaaatgcctctagccgagagcggcgagctgctgaacaggaagcccagctcttgtctcagttgaagcatcccaacattgtcacctacaaggagtcatgggaaggaggagatggtctgctctacattgtcatgggcttctgtgaaggaggtgatttgtaccgaaagctcaaggagcagaaagggcagcttctgccggagaatcaggtggtagagtggtttgtacagatcgccatggctttgcagtatttacatgaaaaacacatccttcatcgagatctgaaaactcaaaatgtcttcctaacaagaacaaacatcatcaaagtaggggacctaggaattgcccgagtgttggagaaccactgtgacatggctagcaccctcattggcacaccctactacatgagccctgaattgttctcaaacaaaccctacaactataagtctgatgtttgggctctaggatgctgtgtctatgaaatggccaccttgaagcatgctttcaatgcaaaagatatgaattctttagtttatcggattattgaaggaaagctgccagcaatgccaagagattacagcccagagctggcagaactgataagaacaatgctgagcaaaaggcctgaagaaaggccgtctgtgaggagcatcctgaggcagccttatataaagcggcaaatctccttctttttggaggccacaaagataaaaacctccaaaaataacattaaaaatggtgactctcaatccaagccttttgctacagtggtttctggagaggcagaatcaaatcatgaagtaatccacccccaaccactctcttctgagggctcccagacatatataatgggtgaaggcaaatgtttgtcccaggagaaacccagggcctctggtctcttgaagtcacctgccagtctgaaagcccatacctgcaaacaggacttgagcaataccacagaactagccacaatcagtagcgtaaatattgacatcttacctgcaaaagggagggattcagtgagtgatggctttgttcaggagaatcagccaagatatttggatgcctctaatgagttaggaggtatatgcagtatttctcaagtggaagaggagatgctgcaggacaacactaaatccagtgcccagcctgaaaacctgattcccatgtggtcctctgacattgtcactggggaaaagaatgaaccagtgaagcctctgcagcccctaatcaaagaacaaaagccaaaggaccagagtcttgccctgtcgcccaagctggagtgcagtggcacaatcttggctcacagcaacctccgcctcctgggttcaagtgattctccagcctcagcctcccgagtagctgggattacaggcgtgtgccaccacgcccaggatcaagttgctggtgaatgtattatagaaaaacagggcagaatccacccagatttacagccacacaactctgggtctgaaccttccctgtctcgacagcgacggcaaaagaggagagaacagactgagcacagaggggaaaagagacaggtccgcagagatctctttgctttccaagagtcgcctcctcgatttttgccttctcatcccattgttgggaaagtggatgtcacatcaacacaaaaagaggctgaaaaccaacgtagagtggtcactgggtctgtgagcagttcaaggagcagtgagatgtcatcatcaaaggatcgaccattatcagccagagagaggaggcgactaaagcagtcacaggaagaaatgtcctcttcaggcccttcagtgaggaaagcgtctctgagtgtagcagggccaggaaaaccccaggaagaagaccagcccttgcctgcccgacggctctcctctgactgcagcgtcactcaggaaaggaaacagattcattgtctgtctgaggatgagttaagttcttctacaagttcaactgataagtcagatggggattacggggaagggaaaggtcagacaaatgaaattaatgccttggtacaattgatgactcagaccctgaaactggattctaaagagagctgtgaagatgtcccggtagcaaacccagtgtcagaattcaaacttcatcggaaatatcgggacacactgatacttcatgggaaggttgcagaagaggcagaggaaatccattttaaagagctaccttcagctattatgccaggttctgaaaagatcaggagactagttgaagtcttgagaactgatgtaattcgtggcctgggagttcagcttttagagcaggtgtatgatcttttggaggaggaggatgaatttgatagagaggtacgtttgcgggagcacatgggtgaaaagtatacaacttacagtgtgaaagctcgccagttgaaattttttgaagaaaacatgaatttttgagcatttgtcctaatctgctgccagaattaaagacctatttttagaggattttggcttaaaaagcaagggcaaacagtcatttggaagccactcaccactgttttatatctcttttttatatctctttggcgtttccctacagaaaagaaattggacagaacagaataatatgaagcaggatcacaaaagaaaaaaaactttggctttcatattctctttgtgaggacaaatctgttgtttgtttgattactgtttactgagccttaatccaccaagtttatatttagaattttatttttttaaggtactaattaacttaaacacagagctataaaatgctggattgaaaattttatattgtaatgtagagataaaagcagtaggagaaacaaatgacataatatgtcgtcataattcctgctattgttaataaccttaaggagtagttgataaattataaaattttaaaaagtcaattcagttctagaaatagatttaaagaatatgaagttctatctagtacttgagcagctgtatttcttttctacacattgatggacttttaatattttattctcatttaatataaacctcatctagggtatatacaaattaaaactgagacacattggctttgtaaatcagtatgtttttacataatggttttgttagatttatttttccatcagtgaaaacatttcttaaacacaaatttcatttccatttaagcaatttgtaagcaaagtccaggtccatttagtttttggatatatttaatgtttgtctcctgaagtttgtcttcatgtactgtaagatattagttgtctttccatgttttaaatgtatgattatatagcacatattttattagttgtttaataagaggtaatacccatctaggaaagaaattttatgaagttaaatacaagtcttgaatagtacattttcacttctgtattcgagggactctaaaaataaatattgctccagaaaa

SEQ ID NO: 28846 - DNA, 5672 bp, Homo Sapiens
aatggtttcaaagagagagaatattgccacccatcatttatatcaggcatgggatcctgtcccttctctgtctccggctactacaggtgccctcatcagccacgagaagctgctgctacagatcaaccccgagcgggagctggggagcatgagctacaaactcggccaggtgtccatacactccgtgtggctggggaacagcatcacacccctgagggaggaggaatgggacgaggaagaggaggaggaggccgacgcccctgcaccttcgtcaccacccacgtctccagtcaactccaggaaacaccgggctggagttgacatccactcctgttcgcagtttttgcttgagttgtacagccgctggatcctgccgtccagctcagccaggaggaccccggccatcctgatcagtgaggtggtcagatcccttctagtggtctcagacttgttcaccgagcgcaaccagtttgagctgatgtatgtgacgctgacagaactgcgaagggtgcacccttcagaagacgagatcctcgctcagtacctggtgcctgccacctgcaaggcagctgccgtccttgggatggacaaggccgtggcggagcctgtcagccgcctgctggagagcacgctcaggagcagccacctgcccagcagggttggagccctgcacggcatcctctatgtgctggagtgcgacctgctggacgacactgccaagcagctcatcccggtcatcagcgactatctcctctccaacctgaaagggatcgcccactgcgtgaacattcacagccagcagcacgtactggtcatgtgtgccactgcgttttacctcattgagaactatcctctggacgtagggccggaattttcagcatcaataatacagatgtgtggggtgatgctgtctggaagtgaggagtccaccccctccatcatttaccactgtgccctcagaggcctggagcgcctcctgctctctgagcagctctcccgcctggatgcagaatcgctggtcaagctgagtgtggacagagtgaacgtgcacagcccgcaccgggccatggcggctctgggcctgatgctcacctgcatgtacacaggaaaggagaaagtcagtccgggtagaacttcagaccctaatcctgcagcccccgacagcgagtcagtgattgttgctatggagcgggtatctgttctttttgataggatcaggaaaggctttccttgtgaagccagagtggtggccaggatcctgccccagtttctagacgacttcttcccaccccaggacatcatgaacaaagtcatcggagagtttctgtccaaccagcagccatacccccagttcatggccaccgtggtgtataaggtgtttcagactctgcacagcaccgggcagtcgtccatggtccgggactgggtcatgctgtccctctccaacttcacgcagagggccccggtcgccatggccacgtggagcctctcctgcttctttgtcagcgcgtccaccagcccgtgggtcgcggcgatcctcccacatgtcatcagcaggatgggcaagctggagcaggtggacgtgaaccttttctgcctggtcgccacagacttctacagacaccagatagaggaggagctcgaccgcagggccttccagtctgtgcttgaggtggttgcagccccaggaagcccatatcaccggctgctgacttgtttacgaaatgtccacaaggtcaccacctgctgagcgccatggtgggagagactgtgaggcggcagctggggccggagcctttggaagtctgtgcccttgtgccctgcctccaccgagccagcttggtccctatgggcttccgcacatgccgcgggcggccaggcaacgtgcgtgtctctgccatgtggcagaagtgctctttgtggcagtggccaggcagggagtgtctgcagtcctggtggggctgagcctgaggccttccagaaagcaggagcagctgtgctgcaccccatgtgggtgaccaggtcctttctcctgatagtcacctgctggttgttgccaggttgcagctgctcttgcatctgggccagaagtcctccctcctgcaggctggctgttggcccctctgctgtcctgcagtagaaggtgccgtgagcaggctttgggaacactggcctgggtctccctggtggggtgtgcatgccacgccccgtgtctggatgcacagatgccatggcctgtgctgggccagtggctgggggtgctagacacccggcaccattctcccttctctcttttcttctcaggatttaaaatttaattatatcagtaaagagattaattttaacgtaactctttctatgcccgtgtaaagtatgtgaatcgcaaggcctgtgctgcatgcgacagcgtccggggtggtggacagggcccccggccacgctccctctcctgtagccactggcatagccctcctgagcacccgctgacatttccgttgtacatgttcctgtttatgcattcacaaggtgactgggatgtagagaggcgttagtgggcaggtggccacagcaggactgaggacaggcccccattatcctaggggtgcgctcaactgcagcccctcctcctcgggcacagacgactgtcgttctccacccaccagtcagggacagcagcctccctgtcactcagctgagaaggccagccctccctggctgtgagcagcctccactgtgtccagagacatgggcctcccactcctgttccttgctagccctggggtggcgtctgcctaggagctggctggcaggtgttgggacctgctgctccatggatgcatgccctaagagtgtcactgagctgtgttttgtctgagcctctctcggtcaacagcaaagcttggtgtcttggcactgttagtgacagagcccagcatcccttctgcccccgttccagctgacatcttgcacggtgaccccttttagtcaggagagtgcagatctgtgctcatcggagactgccccacggccctgtcagagccgccactcctatccccaggacaggtccctggaccagcctcctgtttgcaggcccagaggagccaagtcattaaaatggaagtggattctggatggccgggctgctgctgatgtaggagctggatttgggagctctgcttgccgactggctgtgagacgaggcaggggctctgcttcctcagccctagaggcgagccaggcaaggttggcgactgtcatgtggcttggtttggtcatgcccgtcgatgttttgggtattgaatgtggtaagtggaggaaatgttggaactctgtgcaggtgctgccttgagacccccaagcttccacctgtccctctcctatgtggcagctggggagcagctgagatgtggacttgtatgctgcccacatacgtgagggggagctgaaagggagcccctgctcaaagggagcccctcctctgagcagcctctgccaggcctgtatgaggcttttcccaccagctcccaacagaggcctcccccagccaggaccacctcgtcctcgtggcggggcagcaggagcggtagaaaggggtccgatgtttgaggaggcccttaagggaagctactgaattataacacgtaagaaaatcaccattcttccgtattggttgggggctcctgtttctcatcctagctttttcctggaaaagcccgctagaaggtttgggaacgaggggaaagttctcagaactgttgctgctccccacccgcctcccgcctcccccgcaggttatgtcagcagctctgagacagcagtatcacaggccagatgttgttcctggctagatgtttacatttgtaagaaataacactgtgaatgtaaaacagagccattcccttggaatgcatatcgctgggctcaacatagagtttgtcttcctcttgtttacgacgtgatctaaaccagtccttagcaaggggctcagaacaccccgctctggcagtaggtgtcccccacccccaaagacctgcctgtgtgctccggagatgaatatgagctcattagtaaaaatgacttcacccacgcatatacataaagtatccatgcatgtgcatatagacacatctataattttacacacacacctctcaagacggagatgcatggcctctaagagtgcccgtgtcggttcttcctggaagttgactttccttagacccgccaggtcaagttagccgcgtgacggacatccaggcgtgggacgtggtcagggcagggctcattcattgcccactaggatcccactggcgaagatggtctccatatcagctctctgcagaagggaggaagactttatcatgttcctaaaaatctgtggcaagcacccatcgtattatccaaattttgttgcaaatgtgattaatttggttgtcaagttttgggggtgggctgtggggagattgcttttgttttcctgctggtaatatcgggaaagattttaatgaaaccagggtagaattgtttggcaatgcactgaagcgtgtttctttcccaaaatgtgcctcccttccgctgcgggcccagctgagtctatgtaggtgatgtttccagctgccaagtgctctttgttactgtccaccctcatttctgccagcgcatgtgtcctttcaaggggaaaatgtgaagctgaaccccctccagacacccagaatgtagcatctgagaaggccctgtgccctaaaggacacccctcgcccccatcttcatggagggggtcatttcagagccctcggagccaatgaacagctcctcctcttggagctgagatgagccccacgtggagctcgggacggatagtagacagcaataactcggtgtgtggccgcctggcaggtggaacttcctcccgttgcggggtggagtgaggttagttctgtgtgtctggtgggtggagtcaggcttctcttgctacctgtgagcatccttcccagcagacatcctcatcgggctttgtccctcccccgcttcctccctctgcggggaggacccgggaccacagctgctggccagggtagacttggagctgtcctccagaggggtcacgtgtaggagtgagaagaaggaagatcttgagagctgctgagggaccttggagagctcaggatggctcagacgaggacactcgcttgccgggcctggccctcctgggaaggagggagctgctcagaatgccgcatgacaactgaaggcaacctggaaggttcagggcccgctcttcccccatgtgcctgtcacgctctggtgcagtcaaaggaacgccttcccctcagttgtttctaagagcagagtctcccgctgcaatctgggtggtaactgccagccttggaggatcgtggccaacgtggacctgcctacggagggtgggctctgacccaagtggggcctccttgcccaggtctcactgctttgcaccgtggtcagagggactgtcagctgagcttgagctcccctggagccagcagggctgtgatgggcgagtcccggagccccacccagacctgaatgcttctgagagcaaagggaaggactgacgagagatgtatatttaattttttaactgctgcaaacattgtacatccaaattaaagggaaaaaatggaaaccatcaa

SEQ ID NO: 28847 - DNA, 2969 bp, Homo Sapiens
agcgctgccgcttctgagttcctggtccagaactttacacagaaaaggtgctcaaaggatatttgtttaatgaatgtggtatgctgacatttaaacaggacaaaacttgtagaacttcatggaggaacacggagtgacccaaaccgaacatatggctaccatagaagcacatgcagtggcccagcaagtgcagcaggtccatgtggctacttacaccgagcatagtatgctgagtgctgatgaagactcgccttcttcgcccgaggacacctcttacgatgactcagatatactcaactccacagcagctgatgaggtgacagctcatctggcagctgcaggtcctgtgggaatggccgctgctgctgctgtggcaacaggaaagaaacggaaacggcctcatgtatttgagtctaatccatctatccggaagaggcaacaaacacgtttgcttcggaaacttcgagccacgttagatgaatatactactcgtgtgggacagcaagctattgtcctctgtatctcaccctccaaacctaaccctgtctttaaagtgtttggtgcagcacctttggagaatgtggtgcgtaagtacaagagcatgatcctggaagacctggagtctgctctggcagaacacgcccctgcgccacaggaggttaactcagaactgccgcctctcaccatcgacggaattccagtctctgtggacaaaatgacccaggcccagcttcgggcatttatcccagagatgctcaagtactctacaggtcggggaaaaccaggctgggggaaagaaagctgcaagcccatctggtggcctgaagatatcccctgggcaaatgtccggagtgatgtccgcacagaagagcaaaagcagagggtttcatggacccaggcactacggaccatagttaaaaactgttataaacagcatgggcgggaagaccttttgtatgcctttgaagatcagcaaacgcaaacacaggccacagccacacatagtatagctcatcttgtaccatcacagactgtagtccagacttttagtaaccctgatggcactgtctcacttatccaggttggtacgggggcaacagtagccacattggctgatgcttcagaattgccaaccacggtcaccgttgcccaagtgaattattctgccgtggctgatggagaggtggaacaaaattgggccacgttacagggaggtgagatgaccatccagacgacgcaagcatcagaggccacccaggcggtggcatcgttggcagaggccgcagtggcagcttctcaggagatgcagcagggagctacagtcactatggcgcttaacagcgaagctgccgcccatgctgtcgccaccctggctgaggccaccttacaaggtgggggacagatcgtcttgtctggggaaaccgcagcagccgtcggagcacttactggagtccaagatgctaatggcctggtccagatccctgtgagcatgtaccagactgtggtgaccagcctcgcccagggcaacggaccagtgcaggtggccatggcccctgtgaccaccaggatatcagacagcgcagtcaccatggacggccaagctgtggaggtggtgacattggaacagtgacatacagccatattatggcatcgttttctagtctacttcaaaattttttacacgtttgcagaggtgcaatcaaatggaattaagtctctcgactttggaaggaaagttttgttaaccttttttttttaaaaggaagaaagcggattttggaattgcattttttaaagcaccactcttgattttctgggattggtgaagaaactgcattgtcaatttcactgtcccaaaaaagccaaattgtggcaggacttctttctgcggaaatgtgtgtgtatacttatgtgtgtgcatgtgtgagtgtgaatatatgtatatgtgtacatatggacatacacatttacaatatatataaagtatatatatacatatatatatatatgtatgaaacccgcatggaattatctgtatgaaatcaaggtgcgctgtggaaacaataattcacccagtttagtgggtggtagggtacgtggccagacacagtcacccagtttttgttcataccagggtcatgcgttgagctactgacaaactcaggcggaggtgaccatgcccttcaccaaagctgcctcccagtggccacacagaactctccctgctggactcacctgaggaaagaggctccagcatggggtgggtcagagatgtgcttgcaaggtccagggactgcgtggtctgccagctgagatgctcctcgggctggcccaggtgctgaccttgccacaggcagatgaatgtcttgaaagctcccgggcctcagcctcccatctcctctccttcccaggaatccttgatctcatgactattaaatgttgctctggtttaaggtcagtcctgaattgctcgtatatatgaactgaaggtaaccgaagtattaggggtttgaggagtcgtcgtgtaagtgtgcttgtgtgtgtgcgtgcatggtgggggagaggatgggaagggggcgggggcagtggaagggaaaggaaggaaagaaaaatcgtcctagaccaggatacacccgtgggagcaattttctctactgtctgtagcttcacagaggaggcgctggaatgaacaagaagagacatctggtctgtggccacagcaccctgaacgcccctgatcttgtgtgatcttggaagctaagcttggttgggcccggtcagtacgcagaagggaagaagggacacctggccatagaaaacagctgagggtgtttgctgtgttcctggatcaggccctgcttcagaagggactcctggaggcccatgttccttgatgcaacctcctggcccaggccgggagcagcttgcctcctcagaggtgttgactatctgggtgttcttggtaacaa

SEQ ID NO: 28848 - DNA, 1766 bp, Homo Sapiens
caggactagagagcgagccgcaaggaagtcggtgcagtcgagacccccctccccatcccagcgcatcgcgtctccgccgagcttgagggcacgccggggacccctccccagagccggccggaccccaggtgccgaggccttggggagcgcggggcgtcccgggtcgcggtgccctcgggacgagacagcccctggcagtgccaccaccgcagccgccgggcgatctccaagcggcgatctctaagcgctgctctctgctcggccgcgggccaggaggggagggtccggccttgccccgcaggcgtccattggcggcttcccccggcctccgcgccatgccgcgggccgtgtgaaaggcggcagcaccggaacccgcaggtgtccgcgggcgcgccaagcccttttgggtagggggcgccttactcgctatgctgcaagggccccgggccttggcttcggccgctgggcagaccccgaaggtggtgcccgcgatgagccccacagagctgtggccatccggcctcagcagcccccagctctgcccagctactgctacctactacacaccgctgtacccgcagacggcgcctcccgcagcggcgccaggcacctgcctcgacgccactccccacggacccgagggccaagttgtgcgatgcctgccggcaggccggctgccggccaaaaggaagctggatctggaggggattgggaggcccgtcgtccctgagttcccaacccccaaggggaagtgcatcagagtggatggcctccccagccccaaaacccccaaatcccccggggagaagactcggtatgacacttcgctggggctgctcaccaagaagttcatttacctcctgagcgagtcagaggatggggtcctggacctgaactgggccgctgaggtgctggacgtgcagaagcggcgcatctatgacatcaccaacgtgctggaaggcatccagctcatccgcaagaaggccaagaacaacatccagtgggtaggcaggggaatgtttgaagaccccaccagacctgggaagcagcaacagctggggcaggagctgaaggagctgatgaacacggagcaggccttggaccagctcatccagagctgctctctgagcttcaagcacctgactgaggacaaggccaacaagaggctggcctatgtgacttaccaggatatccgtgctgttggcaactttaaggagcagacagtgattgccgtcaaggcccctccgcagacgagactggaagtgcccgacaggactgaggacaacctgcagatatatctcaagagcacccaagggcccatcgaagtctacctgtgcccagaggaggtgcaggagccggacagtccttccgaggagcctctcccctctacctccaccctctgccccagccctgactctgcccagcccagcagcagcaccgaccctagcatcatggagcccacagcatcctcagtgccagcaccagcgccaaccccccagcaggccccaccgcctccatccctggtccccttggaggctactgacagcctgctggagctgccgcacccactcctgcagcagactgaggaccagttcctgtccccgaccctggcgtgcagctcccctctgatcagcttctccccatccttggaccaggacgactacctgtggggcttggaggcgggtgagggcatcagcgatctcttcgactcctacgaccttggggacctgttgattaattgagtggccctgcctgcccccagcagc

SEQ ID NO: 28849 - DNA, 2018 bp, Homo Sapiens
cagccaatgccggaacaggatttgctgttgctgagcctcaaatcgcaatgttttgtgggaagttaaatatgcatgtgaacattcagactgggaaatgggaacctgatccaacaggcaccaagagctgctttgaaacaaaagaagaagttcttcagtactgtcaggagatgtatccagagctacagatcacaaatgtgatggaggcaaaccagcgggttagtattgacaactggtgccggagggacaaaaagcaatgcaagagtcgctttgttacacctttcaagtgtctcgtgggtgaatttgtaagtgatgtcctgctagttccagaaaagtgccagtttttccacaaagagcggatggaggtgtgtgagaatcaccagcactggcacacggtagtcaaagaggcatgtctgactcagggaatgaccttatatagctacggcatgctgctcccatgtggggtagaccagttccatggcactgaatatgtgtgctgccctcagacaaagattattggatctgtgtcaaaagaagaggaagaggaagatgaagaggaagaggaagaggaagatgaagaggaagactatgatgtttataaaagtgaatttcctactgaagcagatctggaagacttcacagaagcagctgtggatgaggatgatgaggatgaggaagaaggggaggaagtggtggaggaccgagattactactatgacaccttcaaaggagatgactacaatgaggagaatcctactgaacccggcagcgacggcaccatgtcagacaaggaaattactcatgatgtcaaagttcctccaactcctctgccaaccaatgatgttgatgtgtatttcgagacctctgcagatgataatgagcatgctcgcttccagaaggctaaggagcagctggagattcggcaccgcaaccgaatggacagggtaaagaaggaatgggaagaggcagagcttcaagctaagaacctccccaaagcagagaggcagactctgattcagcacttccaagccatggttaaagctttagagaaggaagcagccagtgagaagcagcagctggtggagacccacctggcccgagtggaagctatgctgaatgaccgccgtcggatggctctggagaactacctggctgccttgcagtctgacccgccacggcctcatcgcattctccaggccttacggcgttatgtccgtgctgagaacaaagatcgcttacataccatccgtcattaccagcatgtgttggctgttgacccagaaaaggcggcccagatgaaatcccaggtgatgacacatctccacgtgattgaagaaaggaggaaccaaagcctctctctgctctacaaagtaccttatgtagcccaagaaattcaagaggaaattgatgagctccttcaggagcagcgtgcagatatggaccagttcactgcctcaatctcagagacccctgtggacgtccgggtgagctctgaggagagtgaggagatcccaccgttccaccccttccaccccttcccagccctacctgagaacgaagacactcagccggagttgtaccacccaatgaaaaaaggatctggagtgggagagcaggatgggggactgatcggtgccgaagagaaagtgattaacagtaagaataaagtggatgaaaacatggtcattgacgagactctggatgttaaggaaatgattttcaatgccgagagagttggaggcctcgaggaagagcgggaatccgtgggcccactgcgggaggacttcagtctgagtagcagtgctctcattggcctgctggtcatcgcagtggccattgccacggtcatcgtcatcagcctggtgatgctgaggaagaggcagtatggcaccatcagccacgggatcgtggaggttgatccaatgctcaccccagaagagcgtcacctgaacaagatgcagaaccatggctatgagaaccccacctacaaatacctggagcagatgcagatttaggtggca

SEQ ID NO: 28850 - DNA, 902 bp, Homo Sapiens
atggaggcctgcgtgtcttcactgctggtgctggccctgggggccctgtcagtaggcagctcctttgggacccagatcatcgggggccgggaggtgatcccccactcgcgcccgtacatggcctcactgcagagaaatggctcccacctgtgcgggggtgtcctggtgcacccaaagtgggtgctgacggctgcccactgcctggcccagcggatggcccagctgaggctggtgctggggctccacaccctggacagccccggtctcaccttccacatcaaggcagccatccagcaccctcgctacaagcccgtccctgccctggagaacgacctcgcgctgcttcagctggacgggaaagtgaagcccagccggaccatccggccgttggccctgcccagtaagcgccaggtggtggcagcagggactcggtgcagcatggccggctgggggctgacccaccagggcgggcgcctgtcccgggtgctgcgggagctggacctccaagtgctggacacccgcatgtgtaacaacagccgcttctggaacggcagcctctcccccagcatggtctgcctggcggccgactccaaggaccaggctccctgcaagggtgactcgggcgggcccctggtgtgtggcaaaggccgggtgttggccggagtcctgtccttcagctccagggtctgcactgacatcttcaagcctcccgtggccaccgctgtggcgccttacgtgtcctggatcaggaaggtcaccggccgatcggcctgatgccctggggtgatggggaccccctcgctgtctccacaggacccttcccctccaggggtgcagtggggtgggtgaggacgggtgggagggacagggagggaccaataaatcataatgaagaaacgctc

SEQ ID NO: 28851 - DNA, 4952 bp, Homo Sapiens
tcagtctggtactcttttttgaatgttgtcaaaactagttaattggaagttaacggtactatttatactaaaagagtaccagactgtcttcgccttcttgcacttcgcgggagaagttgttggcgcgaatggatcctgagcctcgataacagattcctcaaccggcccacccgccagccagccagcgccttcatcctggggctgcgatggacattcggaaattctttggagtaataccaagtggaaagaaacttgtaagtgaaacagtaaagaagaatgagaaaacaaagtctgatgaagaaactttaaaagcaaagaaaggaataaaggaaatcaaggtaaatagctcccgtaaagaggatgacttcaaacaaaagcaaccaagcaagaaaaagaggatcatctatgattcagattcagagtcagaggagacgttgcaggtaaaaaatgccaaaaagccaccagaaaaactgccagtatcttctaaacctggtaaaatttcacggcaggatcctgttacatacatttcagaaacagatgaagaagatgactttatgtgtaagaaggcggcctctaaatcaaaagagaatggaagatctacaaatagtcatcttggaacatcaaacatgaaaaagaatgaagaaaacactaagaccaagaataagcctttatcaccaataaaacttacacccacatcagtacttgattattttggaactggaagtgtccaaagatctaataagaagatggtggcaagcaaaagaaaagagctttcacaaaatacagatgagtctggattaaatgatgaagccatcgccaagcaattacagcttgatgaagatgcggagctggagaggcagttgcatgaagatgaagagtttgccagaacattagccatgttggatgaagaacccaagaccaaaaaggctcgaaaggacacagaagcgggagaaacgttttcatctgtccaagccaatttaagtaaagcagaaaaacataaatatcctcataaagtaaaaacagcacaagtttcagatgaaagaaagagctacagtcctaggaagcaaagtaaatatgaaagttcaaaagaatctcagcaacattccaagtcatcagctgacaaaataggagaagtctcttctcccaaggccagttctaagctggcaattatgaaaagaaaaaaagagagctcttataaagaaatagagcctgtggcctcaaaaagaaaagaaaatgccattaaattgaaaggagagacaaaaactcctaagaaaaccaaaagttctccagctaaaaaagagtctgtaagtcctgaagattctgaaaagaaacgcactaattatcaagcttatcgaagctacttaaatcgagaaggtcccaaggctctgggctccaaagaaataccaaagggagctgaaaattgcttggaaggccttatatttgtaatcacaggcgtgctggagtctattgaacgagatgaggccaagtctctaattgaacgttatgggggaaaagtaacaggaaatgtcagcaagaaaacaaattatcttgtcatgggtcgtgatagtggacagtccaagagtgataaggccgcagccttggggacaaaaattattgatgaagatggcctgttgaatctgattcggactatgccaggcaagaaatccaagtatgaaatagcagttgaaactgagatgaagaaagagtccaaactggagagaacaccccaaaaaaatgtccaaggaaaaagaaaaattagtccatctaaaaaggaatcagaatctaaaaagagcaggccgacttccaaaagggacagtttggcaaagacaataaaaaaggaaacagatgtgttttggaaaagcctggatttcaaggagcaggtggctgaggagacaagtggtgacagcaaggctaggaatttggctgatgacagcagtgaaaacaaagtggaaaatttgctctgggtggataaatataagccaacctcgctcaagaccataattggacagcaaggtgaccagagctgtgccaacaaactcctacgctggctccgaaactggcaaaagagttcttccgaagataaaaaacacgcagcaaagtttggtaaattttccggcaaagatgatggctctagttttaaagcagcgttgctgtcaggccctcctggtgttggcaaaaccaccacagcttccctggtgtgtcaggagttgggatacagctacgtggaactgaatgcaagtgacacccggagtaagagcagtttgaaagcgattgttgctgagtcactgaacaataccagcatcaaaggcttttattcaaatggagcagcctcttcagtaagcacgaaacatgctctcatcatggatgaagtagatggcatggcaggcaatgaggataggggaggaattcaggaattaattggcctgataaaacatactaaaattcccattatttgtatgtgcaatgatagaaatcatcccaagattcgctctctggttcattattgttttgatcttcgttttcaaagacctcgggttgaacagattaagggtgctatgatgtctattgcatttaaagaaggtttaaagattccccctccagctatgaatgaaataattttgggagccaatcaagatatcagacaggttttacataatctgagtatgtggtgtgcacgaagtaaagcattaacctatgaccaggccaaagctgattctcacagagccaaaaaggatatcaaaatgggcccatttgatgttgcccggaaagtgtttgcagctggagaggagactgctcacatgtcacttgtggacaagtcagatctcttttttcatgattattcaatagcacccctcttcgtccaggaaaattacatacacgtgaagcctgtagcagcagggggtgacatgaaaaagcacctgatgcttttaagcagagcagcagacagcatatgcgatggtgacctagtggacagccagatccggagtaagcaaaactggagtcttctgcctgcgcaggccatttatgccagtgttcttcctggagagttgatgagggggtacatgacccagtttcccaccttcccaagctggctggggaagcactcgtctacaggcaaacatgatcgtattgttcaggacctggccttgcatatgagtctcagaacttactccagcaaaaggactgtaaacatggattatctgtcgcttctaagggatgcacttgtacagcccttgacctcacaaggagtagacggagtacaggatgttgttgcacttatggacacatattatttgatgaaagaagactttgagaatatcatggaaatcagcagctggggtggcaaacctagtcccttttcaaagctggatcccaaggtgaaagcagccttcacaagagcttacaataaggaagcccaccttactccatactcacttcaagctataaaggcatctagacacagcacaagcccatccctggattcggaatacaatgaagaattaaatgaagatgactctcaatctgatgagaaagaccaagatgctatagaaactgatgccatgatcaagaaaaagacaaaatcttcaaagccttcaaaaccagaaaaagataaggagcccagaaaaggaaaaggaaaaagttcgaagaaatgaaaccatttttcactagcgacagccactttttactctccctcctgaccagtccagctggtctagagaaagccttgttttttcccagagcaaccatgttttagcataatgggatgacctggtgtcccattataaataaagggtggtatggctagaagggtatgagcagtaggcttatgtacacctcttatagaggttgataggactgcttgggtcctccactgtcctctgtcaatctagttagacgtgcttctgaatgactgtagaattggaactagaaactacacctgggctttggagtcagattttagttaacaataatgagcctggagcagtagtactaaggcgtcttttgtaggcttaagaatttatcctaatggcctttataggaccaatgctgattttttttaaaggcagttcctattatgtggtgaaattttgtaaataaatgattatacaaaacagtcaccacctagaactgggtattctttgtacattgtcagatatctttcaaagtataaattaggaataaaaatgttccacatgatatgtgtacaaattctttttaagattgtcatcttgtacagcaaaatattatgttggtatattacttccttattaatttgcaaatgattggattaaaaaagctcactgtattccttactaacctgttgtgtgaaacataacattggcagtcgaggagtcagaactcggattcccagcctcactccctctgtgtgtgttgaccacgtctctgctgtgaataggatttcatgcagtggtctgttatggggctttgcagcgtggggggctgcagaagattctcagacattcttatccttctggagtctcaacccatcaggttcagaccagtaggaaccaggctgggtcaggctcttaatttcactacggtgggggacaaaatgaacactggcttttgttcactttgcccctgagagatctagtcctgtcctgtgatggcttccacaaaccctgttggaagtttgggttattcctataactgtatgtgttgagtggccgtgacgtatggacctagcctggaatttagatgtctagctattttttaatcttgttggtaaatgctcagaggtctgtgctacctctgtgaggtatatactaaaatgaatgtaaaataaggatcgtattccctgctttaaggaactggtagtcttgtttgggtgatgagacaaagttcttgagacatttaaactgtatttaccagtgtgaaaaatgtcatttatggagattaattcattatggaaataaaacattgcctaagca

SEQ ID NO: 28852 - DNA, 980 bp, Homo Sapiens
ctgcagcctcagactcaatcaggaaatacttagcattatgctccagggtggttttcttcccttacattgcaactggactccttgaggcacctttttagaattagtgagccgctaggatttttatactatgctttgacataaaagaaagttgcttgtcaatatgtgtttttttagtttaccagcatatagatctcacaacaaattttaggctcggattggatgtttctagtaacaacaagaaaatccaggcatcactaaaagaatcagaaatacgttgtggcttgaaaggtgcaaactaaataatatagctagcagtaacggtcaccaactcctgcttttctttggttcagtagatagagtaaaatggaaaataggaaacccaaggtcagtccccaaatctcattttaaccaatagcagcaaaaaaaaaaaaaaaaaaaaggaattgagtctgactttttcccttgctgtcagcataaagatggggaattgagagagttggaaagacattcattagtttgttcagattattaaataacatgtcttaaagtttatattccaaaattgggctgtgaggtttttttgttttgcttgttttcagtgcatgtgtggggtggggaggtgcaaaaaaatgtttgccttctaatatacagctttgttgtatataattatatagtaacagttgtccctgctgctaatggtatggaaaatgattctgttgtgctttctgaatacatatcattttagaagtttcagattatactaaaaccatgttatttcatattagttggacatgaatgcatatttatatgacacatcattatcaacttttgccttttgccatctttttagtgcaaagtaaaactgatattcttcaaatccaaagtcgtttcctcagaagtgtgttttgtgagggattgcatctttcccatgtgaaactgagtcgaactccagtaaactgtgtttgcttgggaaaatgaat

SEQ ID NO: 28853 - DNA, 3647 bp, Homo Sapiens
ataagctgaattatggcagcccagtcaagtttgtacaatgacgacagaaacctgcttcgaattagagagaaggaaagacgcaaccaggaagcccaccaagagaaagaggcatttcctgaaaagattcccctttttggagagccctacaggacagcaaaaggtgatgagctgtctagtcgaatacagaacatgttgggaaactacgaagaagtgaaggagttccttagtactaagtctcacactcatcgcctggatgcttctgaaaataggttgggaaagccgaaatatcctttaattcctgacaaagggagcagcattccatccagctccttccacactagtgtccaccaccagtccattcacactcctgcgtctggaccactttctgttggcaacattagccacaatccaaagatggcgcagccaagaactgaaccaatgccaagtctccatgccaaaagctgcggcccaccggacagccagcacctgacccaggatcgccttggtcaggaggggttcggctctagtcatcacaagaaaggtgaccgaagagctgacggagaccactgtgcttcggtgacagattcggctccagagagggagctttctcccttaatctctttgccttccccagttccccctttgtcacctatacattccaaccagcaaactcttccccggacgcaaggaagcagcaaggttcatggcagcagcaataacagtaaaggctattgcccagccaaatctcccaaggacctagcagtgaaagtccatgataaagagacccctcaagacagtttggtggcccctgcccagccgccttctcagacatttccacctccctccctcccctcaaaaagtgttgcaatgcagcagaagcccacggcttatgtccggcccatggatggtcaagatcaggcccctagtgaatcccctgaactgaaaccactgccggaggactatcgacagcagacctttgaaaaaacagacttgaaagtgcctgccaaagccaagctcaccaaactgaagatgccttctcagtcagttgagcagacctactccaatgaagtccattgtgttgaagagattctgaaggaaatgacccattcatggccgcctcctttgacagcaatacatacgcctagtacagctgagccatccaagtttcctttccctacaaaggactctcagcatgtcagttctgtaacccaaaaccaaaaacaatatgatacatcttcaaaaactcactcaaattctcagcaaggaacgtcatccatgctcgaagacgaccttcagctcagtgacagtgaggacagtgacagtgaacaaaccccagagaagcctccctcctcatctgcacctccaagtgctccacagtcccttccagaaccagtggcatcagcacattccagcagtgcagagtcagaaagcaccagtgactcagacagttcctcagactcagagagcgagagcagttcaagtgacagcgaagaaaatgagcccctagaaaccccagctccggagcctgagcctccaacaacaaacaaatggcagctggacaactggctgaccaaagtcagccagccagctgcgccaccagagggccccaggagcacagagcccccacggcggcacccagagagtaagggcagcagcgacagtgccacgagtcaggagcattctgaatccaaagatcctccccctaaaagctccagcaaagccccccgggccccacccgaagccccccaccccggaaagaggagctgtcagaagtctccggcacagcaggagcccccacaaaggcaaaccgttggaaccaaacaacccaaaaaacctgtcaaggcctctgcccgggcaggttcacggaccagcctgcaggggggaagggagccagggcttcttccctatggctcccgagaccagacttccaaagacaagcccaaggtgaagacgaaaggacggccccgggccgcagcaagcaacgaacccaagccagcagtgcccccctccagtgagaagaagaagcacaagagctccctccctgccccctctaaggctctctcaggcccagaacccgcgaaggacaatgtggaggacaggacccctgagcactttgctcttgttcccctgactgagagccagggcccaccccacagtggcagcggcagcaggactagtggctgccgccaagccgtggtggtccaggaggacagccgcaaagacagactcccattgcctttgagagacaccaagctgctctcaccgctcagggacactcctcccccacaaagcttgatggtgaagatcaccctagacctgctctctcggataccccagcctcccgggaaggggagccgccagaggaaagcagaagataaacagccgcccgcagggaagaagcacagctctgagaagaggagctcagacagctcaagcaagttggccaaaaagagaaagggtgaagcagaaagagactgtgataacaagaaaatcagactggagaaggaaatcaaatcacagtcatcttcatcttcatcctcccacaaagaatcttctaaaacaaagccctccaggccctcctcacagtcctcaaagaaggaaatgctccccccgccacccgtgtcctcgtcctcccagaagccagccaagcctgcacttaagaggtcaaggcgggaagcagacacctgtggccaggaccctccaaaagtgccagcagtaccaagagtcaaccacaaagactcttccattcccaagcagagaagagtagaggggaagggctccagaagctcctcggcagacaagggttcttccggagatactgcaaatccttttccagtgccttctttgccaaatggtaactctaaaccagggaagcctcaagtgaagtttgacaaacaacaagcagaccttcacatgagggaggcaaaaaagatgaagcagaaagcagagttaatgacggacagggttggaaaggcttttaagtacctggaagccgtcttgtccttcaatgagtgcggaattgccacagagtctgaaagccagtcatccaagtcagcttactctgtctactcagaaactgtagatctcattaaattcataatgtcattaaaatccttctcagatgccacagcgccaacacaagagaaaatatttgctgttttatgcatgcgttgccagtccattttgaacatggcgatgtttcgttgtaaaaaagacatagcaataaagtattctcgtactcttaataaacacttcgagagttcttccaaagtcgcccaggcaccttctccatgcattgcaagaagcacaggcacaccatcccctctttccccaatgccttctcctgccagctccgtagggtcccagtcaagtgctggcagtgtggggagcagtggggtggctgccactatcagcaccccagtcaccatccagataatgacatcttcctatgtcaccatcacatcccatgttcttaccgcctttgacctttgggaacaggccgaggccctcacgaggaagaataaagaattctttgctcggctcagacaaatgtgtgcaccttggccctcaacagcagtttggtggacctggtgcactatacacgacagggttttcagcagctacaagaattaaccaaaacaccttaa

SEQ ID NO: 28854 - DNA, 5911 bp, Homo Sapiens
cttgttcctccgccgttgcaatgaactattttctctcagtccggggtggtacttttgagtaaccccttccaaatagaaacccataccagcctatttagctcggtctccactatatgaaggtttcctagggcttggtgtgacgcaacgtatacgaggctcggaaggacaccccgcggaaggatccggtttgttgtggtgtggggaggggagacgctgacaaaccaagatggcggcggcggcgctgaaggccgcggcgtttgggaggtaactgtggtggcgaaggctgcggtagtggggaggcaaccacacagtttggaagaaacggagcgggacgaagaggcggtagcagtagagtcagcctgagactctcagagcacgacggccacacgcccccttaggccctcggcgggcggcggctgcccgcttaggcctagcctccgagcattgcctcggcttcaaacagcggcggcgccatgagtccttaagggcggtccaagcctcccgatccctggcccagacctcgggcccaccatggagccggggtccgacgatttcctaccgccaccggagtgcccggtgttcgagcctagctgggccgagttccgagaccctcttggctacatcgcgaaaatcaggcccatcgcagagaaatcgggcatttgcaagatccgcccacccgcggactggcagccaccctttgctgtggaagtggacaacttcaggtttaccccccgaatccagaggctgaatgagctagaggcccagacgagagtgaaactgaactacttggaccagattgccaaattctgggaaatccagggctcctccttaaagattcccaatgtagaacggcggatcttggacctctacagtctcagcaaaattgtggtggaggaaggtggttatgaagctatctgcaaggaccgtcggtgggctcgggtagcccagcgcctcaactatccaccaggcaaaaatattggctccttgctacgctcccactacgaacgcattgtttatccctatgaaatgtaccagtctggagccaaccttgtgcagtgtaacacacgtccatttgataatgaggagaaggacaaggaatacaaaccccacagcatccccctacgacagtctgtgcagccttccaagttcaacagctatggccggcgggccaagagactgcagcctgatccggaacccacagaggaagacattgagaagaatccagagctgaaaaagctacagatctatggggcaggccccaagatgatgggcctgggcctcatggccaaagacaagactctgcggaagaaagataaggaggggcctgagtgtccccccacagtagtggtgaaggaggagttaggtggggatgtgaaggtggagtcaacatcgcctaagaccttcctggagagcaaggaggagctgagtcacagcccagaaccctgcaccaagatgaccatgaggctacggaggaaccacagcaatgcccagtttattgagtcatatgtctgccggatgtgttctcgaggggatgaggatgacaagctcctgctgtgtgatggctgtgatgacaactaccacatcttctgcctgctgcctcctctgcctgagatccccaagggtgtctggcggtgcccaaagtgtgtcatggcggagtgtaagcggcccccagaagcctttggctttgagcaggctacccgggaatacactctgcagagctttggcgagatggccgactcctttaaagctgactacttcaacatgcccgtgcatatggtgcccacagaacttgtggagaaggagttctggaggctggtaaatagcattgaggaagatgtgactgttgagtatggagctgacatccattccaaagaatttggcagcggtttccctgtcagtgacagtaaacggcacctaacccccgaagaggaggagtatgctaccagtggttggaacctaaatgtgatgccggtgttggaacagtctgtactgtgccacatcaatgcagatatctctggcatgaaggtgccctggctctacgtgggcatggtcttctcagccttttgctggcatattgaggatcactggagttactccattaactacctccactggggtgagccgaagacctggtatggggtgccctcacttgcagcagaacatttggaagaagtgatgaagaagctgacacctgaactatttgatagccagcctgacctcctgcaccaacttgtcaccctcatgaatcccaacaccctcatgtcccatggtgtgccagttgtccgcacaaaccagtgtgcaggagagtttgtcatcaccttcccccgtgcttaccacagcggcttcaaccaaggctacaactttgccgaggctgtcaacttttgcactgctgactggttgcctgctgggcgccagtgcattgagcactaccgccggctccggagatactgcgtcttctcccatgaggagcttatctgcaagatggctgcctgcccagagaagctagacctgaacctggcggcagctgtgcataaggagatgttcatcatggtgcaagaagagcggcgtctacgaaaggccctgctggagaagggtatcacagaggctgagcgagaggctttcgagctgctcccagatgatgagcgccagtgtatcaagtgcaagactacgtgtttcctgtcagccctggcctgctacgactgcccagacggccttgtctgcctttcccacatcaatgatctctgcaagtgctccagtagccggcagtacctgcggtatcggtataccttggatgagcttcctgccatgctgcataagctgaaggttcgggctgagtcctttgacacctgggccaacaaagtgcgagtggccctggaggtggaggatgggcggaagcgcagccttgaagaactgagggcactagagtctgaagcccgtgagcggaggtttcctaatagtgagctgctgcagcaactaaagaactgcctgagtgaggcagaggcttgcgtgtcccgagctctgggactggtcagcggccaggaagctggcccccacagggtggctggtctacagatgaccctgactgagctccgggcctttctggaccagatgaacaacctgccttgcgccatgcaccagattggggatgtcaagggtgttctggaacaggtggaggcctaccaggctgaggctcgtgaggccctggcctcactgccctccagtccagggctactgcagtccctgttggagagggggcggcagctgggggtggaggtgcctgaggcccagcagctccagcggcaggtggaacaggcgcgatggctggatgaggtgaaacgcacactggccccctcagcccgaaggggcaccttggctgtcatgcgaggactgttggtcgcgggtgccagtgtagcccctagccctgctgtggataaagcccaggccgagctgcaggaactgctgaccattgctgaacgctgggaggagaaagcccacctctgcctggaggccaggcagaagcatccaccagccacacttgaggccataatccgtgaagcggaaaacatccctgttcacctgcccaacatccaggctctcaaggaggctcttgctaaggcccgggcctggattgctgatgttgatgagatccaaaatggtgaccactacccctgcctggatgacttggagggcctagtagctgtgggccgggacctacctgtggggctggaggagctgagacagctagagctacaggtactgacagcgcactcctggagggagaaggcctccaagaccttcctcaagaaaaattcttgctacacgctgctggaggttctctgcccatgtgcagatgccggctcagacagcaccaagcgcagccggtggatggagaaggagctggggttgtacaaatctgacacagagctgctggggctgtctgcgcaggacctcagggacccaggctctgtgatcgtggccttcaaggagggggaacagaaggagaaggagggtatcctgcagctgcgtcgcaccaattcggccaagcccagtccactggcatcatcgagcacggcctcctctacaacctctatctgtgtgtgtgggcaggtgctggctggggcgggacgtctgcagtgtgacctgtgtcaggactggttccatgggcggtgtgtgtcagtgcctcgcctcctcagctctccgaggcccaatcccacctcatccccactgctggcctggtgggaatgggacaccaaattcctgtgtccactgtgtatgcgctcaaggcgcccgcgcctggagaccatcctggcactgctggtagccctgcagagactgcctgtgcggctgcccgagggcgaggccctgcagtgcctcacagagagggccatcagctggcaaggccgcgccaggcaggctctggcctctgaagatgtgactgctcttttgggacggctggctgagctccgccaacggctacaggctgaacctagacctgaggagcctcctaactaccctgcagcccctgcttctgaccccctcagagagggcagtggcaaggatatgcctaaggtccagggcttactggagaatggagacagtgtgaccagtcctgagaaggtagccccggaggagggctcaggtaagagagatctggagctgctgtcctcgctgttgccacagttgactggccctgtgttggaactgcctgaggcaacccgggcccccttggaggagctcatgatggagggggacctgctcgaggtgaccctggatgagaaccacagcatatggcagctgctgcaggctggacagcccccagacctggagaggatccgcacacttctggagctggagaaggcagagcgtcacgggagtcgggctcggggccgggccctggagaggcggcggcggcggaaggtggatcggggtggggagggcgatgacccagcccgagaggagctagagccaaagagggtacggagctcagggccagaggctgaggaggtccaggaggaggaagagctggaggaggagactgggggtgagggcccccctgcacccatccccaccactggcagccccagcacccaggagaaccagaatggcttggaaccggcggaagggaccacttcaggcccctcggcccctttctccactctgactccccggctgcatctgccctgcccacagcagccgcctcagcaacagttgtgacagtggctgagcctagcacagaccctgacagagacccccctcggcctcaaggatcctctttctgaccatcaagcctgcttcttggggggtgggcgggtagggggggtggccatccctgctacccgcccacccctgagtcccttgacttttgtattctgactccaaggtattgttcagacctcagctcctgggggccggcccctggagtcttccctccctggtagcctctaaccagcattcccagacacctgaggcagatagatggatgggctggtgggcaggggggtggctggggctgggccatcaccattccagagacaaggccagtgtatatgcaaactgggggactctcctcccttctctccccagttctggtcctggccaggccatgctacactaacccctgcccccactctcctcccctcttttccttccttcctacccccttctccctctcccttcccctgactgttccacccaggaggaggaaacttcacatagccgtgctcacagttttttattttaaaggaatttggctggggagctgaacagggctccctgtgatctgaagaaagcttttggtgcttgtcctcacaaccacctcagtcctccctccctgtcctcccctgtctcctttcctcctcctgggttcatgttgtaataaaagaagattgttggtgtgtaattaatttgttca

SEQ ID NO: 28855 - DNA, 5161 bp, Homo Sapiens
ccagcgcctcacgacccttcgtcctccgctaagctccaacgctctgctcgactagccgcgcgccttccggggctccgcagacccgcgagatggcaccaaggaggaacaacgggcagtgctggtgtctgctgatgctgctctcggtctccacgcccctccctgctgtcacccagacccgcggtgcgacagagactgcttcccagggtcacctggacctcacgcagctcatcggtgacccgctgccctcgtccgtatcctttgtcacaggctatggtggcttcccggcctacagtttcgggcctggtgccaatgttggccgcccagccaggactctcatcccatccaccttcttcagggacttcgccatcaggctcgtggtgaagcccagcagcacccgtggtggcgtgctcttcgccatcactgacgccttccagaaggtcatctacctgggcctgcggctctcaggtgtggaggacggccaccagcggatcatcctctactacacggagccaggctcccatgtgtcccaagaagctcctgccttctcggtgcctgtgatgacccacaggtggaaccgcttcgccatgattgtccagggtgaggaagtgaccctcctcgtgaactgtgaggagcacagccgcatccccttccagcggtcctcccaggctttggcttttgagtccagcgctggaatcttcatgggcaatgcaggagctacagggctcgagagattcactggctccctccagcagctcaccgtgcaccccgaccccaggactcccgaggagctgtgtgaccctgaagagtcctcggcatctggagagaccagtgggctgcaggaggcagacggagtagctgagatcttagaagccgtcacctacactcaagcctcgcccaaagaagcaaaagttgaacccataaacacacctccaactccatcctccccctttgaagacatggaactttctggtgaacctgtacccgaggggaccctggaaaccaccaacatgagcatcatccagcacagcagccccaaacaagggtctggtgagatcctgaatgacacactggagggggttcattctgtggatggtgaccccattactgacagcggctcaggggctggggccttccttgacattgctgaagaaaagaatttagcagcaacagcagcggggctggccgaggtgcccatcagcactgctggagaagcagaggccagcagtgtgcccaccgggggaccaaccctctctatgtccacggagaacccagaggaaggggtcactccaggtccagataatgaagagcgtttacgagcaacagcagcaggggaggccgaggcactcgccagcatgcctggggaagtggaggccagtggtgtggcccccggggagctggacctctccatgtccgcccagagcctcggggaagaggccactgtgggtccaagcagtgaagacagtttaacaacagctgcagctgcaaccgaagtgtccctcagtacttttgaggatgaggaagccagtggggtccccacagatggcctggctcccctcacagccaccatggcccctgagcgggcagtcacttctggtcctggtgatgaagaagacttggcagcagccacaacagaggagcccctcatcacagctgggggtgaagagtccggcagccctccccctgatgggccaccgctgcccctgcccacagtggctcctgaaagatggatcactccagctcaaagagaacatgtgggaatgaaaggacaggctgggcccaaaggagaaaagggtgatgctggggaggagcttcctggccctcctgaaccttctgggcctgttggacccacggcaggagcagaagcagagggctctggcctaggctggggctcggacgtcggctctggctctggtgacctggtgggcagtgagcagctgctgagaggtcctccaggacccccagggccacctggcttacctgggattccaggaaaaccaggaactgatgttttcatgggaccccctggatctcctggagaggatggacctgctggtgaacctgggcccccgggccctgagggacagcctggagttgatggagccaccggccttcccgggatgaaaggggagaagggagcaagagggcctaatggctcagttggtgaaaagggtgaccctggcaacagaggcttacctggacccccggggaaaaagggacaagctggccctcctggggtcatgggacccccagggcctcctggaccccctgggcccccaggccctggatgcacaatgggacttggattcgaggataccgaaggctctggaagcacccagctattgaatgaacccaaactctccagaccaacggctgcaattggtctcaaaggagagaaaggagaccggggacccaagggagaaagggggatggatggagccagtattgtgggaccccctgggccgagagggccacctgggcacatcaaggtcttgtctaattccttgatcaatatcacccatggattcatgaatttctcggacattcctgagctggtggggcctccggggccggacgggttgcctgggctgccaggatttccaggtcctagaggaccaaaaggtgacactggtttacctggctttccaggactaaaaggagaacagggcgagaagggagagccgggtgccatcctgacagaggacattcctctggaaaggctgatggggaaaaagggtgaacctggaatgcatggagccccaggaccaatggggcccaaaggaccaccaggacataaaggagaatttggccttcccgggcgacctggtcgcccaggactgaatggcctcaagggtaccaaaggagatccaggggtcattatgcagggcccacctggcttacctggccctccaggcccccctgggccacctggagctgtgattaacatcaaaggagccattttcccaatacccgtccgaccacactgcaaaatgccagttgatactgctcatcctgggagtccagagctcatcacttttcacggtgttaaaggagagaaaggatcctggggtcttcctggctcaaagggagaaaaaggcgaccagggagcccagggaccaccaggtcctccacttgatctagcttacctgagacactttctgaacaacttgaagggggagaatggagacaaggggttcaaaggtgaaaaaggagaaaaaggagacattaatggcagcttccttatgtctgggcctccaggcctgcccggaaatccaggcccggctggccaaaaaggggagacagtcgttgggccccaaggacccccaggtgctcctggtctgcctgggccacctggctttggaagacctggtgatcctgggccaccggggcccccggggccaccaggacctccagctatcctgggagcagctgtggcccttccaggtccccctggccctccaggacagccagggcttcccggatccagaaacctggtcacagcattcagcaacatggatgacatgctgcagaaagcgcatttggttatagaaggaacattcatctacctgagggacagcactgagtttttcattcgtgttagagatggctggaaaaaattacagctgggagaactgatccccattcctgccgacagccctccaccccctgcgctttccagcaacccacatcagcttctgcctccaccaaaccctatttcaagtgccaattatgagaagcctgctctgcatttggctgctctgaacatgccattttctggggacattcgagctgattttcagtgcttcaagcaggccagagctgcaggactgttgtccacctaccgagcattcttatcttcccatttgcaagatctgtccaccattgtgaggaaagcagagagatacagccttcccatagtgaacctcaagggccaagtactttttaataattgggactcaattttttctggccacggaggtcagttcaatatgcatattccaatatactcctttgatggtcgagacataatgacagatccttcttggccccagaaagtcatttggcatggctccagcccccatggcgtccgccttgtggataactactgtgaagcatggcgaaccgcggacacagcggtcacgggacttgcctccccgctgagcacggggaagattctggaccagaaagcatacagctgtgctaatcggctaattgtcctatgtatcgaaaacagtttcatgacagacgctaggaagtaatggccttctgatgattcttaaagagttttcaattttttcttatgtgaagagttgacactgaaatctaaaatgtttaattgttgtaaatattacagtttttttttttttactacatattctttacaacagcaaccaaagaaaacatacctcaatacactcaaaactgaagacatagaggactcagatcaaagacaaaatctgatccatatattggtgctagattctgcaggaaaccccagcagtgtgaacgcatcccaacataggttaagagcaagttgaaaacaaaggccagattctgccactgcatccttcagacagttatatcctccttttaaaccattgttgttgagtgtaagatgtccttcatgttttcttataaagtcagtgtttagaaatgttaccctttctaagttatatacagatcaaatgcttttttctttcacgtacatccatcatttgcaactgctgttcgtacacagaaacaggactgctcaaatgatcctatttgtattttctgatgctatcagactctaatgtttttttccctaaaatattattgccatcatgctttaggaatttttatatttttacacaatcatattttagtatggtgtctgtttatgtaactctgacttgctggaaaagttgaaactccaaataatctgaaactagaaaagaaatagcacataattactaccttccccttggcggctctcctcccccaacccccaccccacaattttatgacttccatttggcaattgttgaattataactgcgactgaaacaaacaggttcatagagatgaattttctgagaaacatatatctacatgttgtataattggattttttttccatgtaagtgaacataaaaacatcttttccggggtgctttcttcattt

SEQ ID NO: 28856 - DNA, 1969 bp, Homo Sapiens
gaataaaatgaacaattcagttcctcagtcacatgagctgtgtgtcaaatgcacaacagccgtatgtggctcgtggcccctgtaccggacactcccatccctgcagagttactggacagtgctgatctagggattctgttacaaaatccatgaaagtgttcagcacaatgccgggcccatataaacgtcagtagttgttgttattataattagtcttgacccaacggcaaattcactttgagaccttagataaatcactctacctctctgagcctggtttccttgccctaaaaggatggcaaggggctgggcatggtggccactgaggatgagaggctagcagggagcggtgagggagagcggctggatttcttacgggatcggcacgtgcgatttttccagcgctgcctccaggttttgccggagcgctattcttcactcgagacaagcaggttgacaattgcattttttgcactctccgggctggatatgttggattccttagatgtggtgaacaaagatgatataatagagtggatttattccctgcaggtccttcccacagaagacagatcaaatctaaatcgctgtggtttccgaggctcttcatacctgggtattccgttcaatccatcaaaggctcctggaacagctcatccttatgatagtggccacattgcaatgacctacactggcctctcatgcttagttattcttggagacgacttaagccgagtaaataaagaagcttgcttagcgggcttgagagcccttcagctggaagatgggagtttttgtgcagtacctgaaggcagtgaaaatgacatgcgatttgtgtactgtgcttcctgtatttgctatatgctcaacaactggtcaggcatggatatgaaaaaagccatcacctatattagaaggagtatgtcctatgacaatggactggcacagggagctggacttgaatctcatggaggatcaactttttgtggcattgcctcactatgtctgatgggtaaactagaagaagttttttcagaaaaagaattgaacaggataaagaggtggtgtataatgaggcaacaaaatggttatcatggaagacctaataagcctgtagacacctgttattctttttgggtgggagcaactctgaagcttctaaaaattttccaatacactaactttgagaaaaatagaaattacatcttatcaactcaagatcgccttgtagggggatttgccaagtggccagacagtcatccagatgctttgcatgcatactttgggatctgtggcctgtcactaatggaggaaagtggaatttgtaaagttcatcctgctctgaatgtaagcacacggacttctgaacgccttctagatctccatcaaagctggaaaaccaaggactctaaacaatgctcagagaatgtacatatctccacatgactgattttagattgggagggtgggggggatttgtagcataactgtagctcaagtttaaaagccatgtataaccaagtgtgctctttttttaaaaggtagagtcttacaatcaaatctcctgctgatttcactttgggatatggtcttgagccagtaatctttatactgggtttcaagaaaatctttgttgaagtttgaaccacaactttgtcgtggttcttaaatgtttatactgtatttctaagaagttgtttgaggcaaattaactgtatgtgtgtaggttatctttttaaaaactcttcagtgcaaattgtatcttattataaaatggacacaaattttcaagtttacacttcatatagcattgataatcttcaggtgaacacttagtgatcatttaaaaagctcactgctgatcgtagaaaatttgctttaattaattaagtatctgggattattctttgaaaacagatgaccataattttttttaaagaagagtgacttattttgtcttattcttaag

SEQ ID NO: 28857 - DNA, 1461 bp, Homo Sapiens
cgggacccgagcaggagcggcggcacgagcagctgggggcggcggcggcgcgttggaggcggccatggcaaagcagtacgactcggtggagtgccctttttgtgatgaagtttccaaatacgagaagctcgccaagatcggccaaggcaccttcggggaggtgttcaaggccaggcaccgcaagaccggccagaaggtggctctgaagaaggtgctgatggaaaacgagaaggaggggttccccattacagccttgcgggagatcaagatccttcagcttctaaaacacgagaatgtggtcaacttgattgagatttgtcgaaccaaagcttccccctataaccgctgcaagggtagtatatacctggtgttcgacttctgcgagcatgaccttgctgggctgttgagcaatgttttggtcaagttcacgctgtctgagatcaagagggtgatgcagatgctgcttaacggcctctactacatccacagaaacaagatcctgcatagggacatgaaggctgctaatgtgcttatcactcgtgatggggtcctgaagctggcagactttgggctggcccgggccttcagcctggccaagaacagccagcccaaccgctacaccaaccgtgtggtgacactctggtaccggcccccggagctgttgctcggggagcgggactacggcccccccattgacctgtggggtgctgggtgcatcatggcagagatgtggacccgcagccccatcatgcagggcaacacggagcagcaccaactcgccctcatcagtcagctctgcggctccatcacccctgaggtgtggccaaacgtggacaactatgagctgtacgaaaagctggagctggtcaagggccagaagcggaaggtgaaggacaggctgaaggcctatgtgcgtgacccatacgcactggacctcatcgacaagctgctggtgctggaccctgcccagcgcatcgacagcgatgacgccctcaaccacgacttcttctggtccgaccccatgccctccgacctcaagggcatgctctccacccacctgacgtccatgttcgagtacttggcaccaccgcgccggaagggcagccagatcacccagcagtccaccaaccagagtcgcaatcccgccaccaccaaccagacggagtttgagcgcgtcttctgagggccggcgcttgccactagggctcttgtgttttttttcttctgctatgtgacttgcatcgtggagacagggcatttgagtttatatctctcatgcatattttatttaatccccaccctgggctctgggagcagcccgctgagtggactggagtggagcattggctgagagaccaggagggcactggagctgtcttgtccttgctggttttctggatggttcccagagggtttccatggggtaggaggatgggctcgcccaccagtgactttttcccg

SEQ ID NO: 28858 - DNA, 1682 bp, Homo Sapiens
agagaggaaggcgtggctccctcccgggccagtgagccctggcgccgccgcggccgcggtcccagcagcggagtagggcggcggctgcgccccgcaccatggggggcagcccagccccagccgcggtaaacgccgacctccgccgccgcccgcgccgcgtctgccccctcccgctgcggctctctggacgccatcccctcctcacctcgaagccaacatgaaggagacccggggctacggaggggatgcccccttctgcacccgcctcaaccactcctacacaggcatgtgggcgcccgagcgttccgccgaggcgcggggcaacctcacgcgccctccagggtctggcgaggattgcggatcggtgtccgtggccttcccgatcaccatgctgctcactggtttcgtgggcaacgcactggccatgctgctcgtgtcgcgcagctaccggcgccgggagagcaagcgcaagaagtccttcctgctgtgcatcggctggctggcgctcaccgacctggtcgggcagcttctcaccaccccggtcgtcatcgtcgtgtacctgtccaagcagcgttgggagcacatcgacccgtcggggcggctctgcacctttttcgggctgaccatgactgttttcgggctctcctcgttgttcatcgccagcgccatggccgtcgagcgggcgctggccatcagggcgccgcactggtatgcgagccacatgaagacgcgtgccacccgcgctgtgctgctcggcgtgtggctggccgtgctcgccttcgccctgctgccggtgctgggcgtgggccagtacaccgtccagtggcccgggacgtggtgcttcatcagcaccgggcgagggggcaacgggactagctcttcgcataactggggcaaccttttcttcgcctctgcctttgccttcctggggctcttggcgctgacagtcaccttttcctgcaacctggccaccattaaggccctggtgtcccgctgccgggccaaggccacggcatctcagtccagtgcccagtggggccgcatcacgaccgagacggccattcagcttatggggatcatgtgcgtgctgtcggtctgctggtctccgctcctgataatgatgttgaaaatgatcttcaatcagacatcagttgagcactgcaagacacacacggagaagcagaaagaatgcaacttcttcttaatagctgttcgcctggcttcactgaaccagatcttggatccttgggtttacctgctgttaagaaagatccttcttcgaaagttttgccaggtagcaaatgctgtctccagctgctctaatgatggacagaaagggcagcctatctcattatctaatgaaataatacagacagaagcatgaaagaaaacacttaacttgcatgtgcacagcttctggtaacaaatatcgctaaaccttactgtgaatttaggcatctctggcatgccactgtttatgcattgaagtggaatttttggtataaagctaaatggtcttagaagcatagaaaatccctatgtgccaaaagtagtgaaacacaaacaaaggaaaatatattaataacagtctagtgtttttgttgagtctgccattcgtagctgaatatgtgattaattatgtgatgaaaactttttttataaatgatcttggtctattgggg

SEQ ID NO: 28859 - DNA, 2519 bp, Homo Sapiens
agtcccgcccctgcgtgcggcgcttctcccaggccccaccttccatccagtgccctggaccctcggctgggtagcgccaccagagcgaccaaacgtcccgcgccttccaggccgcactccagagccaaaagagctccatggcggcggcggccaagcccaacaacctttccctggtggtgcacggaccgggggacttgcgcctggagaactatcctatccctgaaccaggcccaaatgaggtcttgctgaggatgcattctgttggaatctgtggctcagatgtccactactgggagtatggtcgaattgggaattttattgtgaaaaagcccatggtgctgggacatgaagcttcgggaacagtcgaaaaagtgggatcatcggtaaagcacctaaaaccaggtgatcgtgttgccatcgagcctggtgctccccgagaaaatgatgaattctgcaagatgggccgatacaatctgtcaccttccatcttcttctgtgccacgccccccgatgacgggaacctctgccggttctataagcacaatgcagccttttgttacaagcttcctgacaatgtcacctttgaggaaggcgccctgatcgagccactttctgtggggatccatgcctgcaggagaggcggagttaccctgggacacaaggtccttgtgtgtggagctgggccaatcgggatggtcactttgctcgtggccaaagcaatgggagcagctcaagtagtggtgactgatctgtctgctacccgattgtccaaagccaaggagattggggctgatttagtcctccagatctccaaggagagccctcaggaaatcgccaggaaagtagaaggtctgctggggtgcaagccggaagtcaccatcgagtgcacgggggcagaggcctccatccaggcgggcatctacgccactcgctctggtgggaccctcgtgcttgtggggctgggctctgagatgaccaccgtacccctactgcatgcagccatccgggaggtggatatcaagggcgtgtttcgatactgcaacacgtggccagtggcgatttcgatgcttgcgtccaagtctgtgaatgtaaaacccctcgtcacccataggtttcctctggagaaagctctggaggcctttgaaacatttaaaaagggattggggttgaaaatcatgctcaagtgtgaccccagtgaccagaatccctgatgttaatgggctctgctcatccccacagtctcgggatctcagggcacaatggctggacaggggtgggctctgatgcagaactttctcttttgaatgttaagaataactaatacaattcattgtgaacagaagtccttaagcagaggaattggtgtgccttaaagatacaatctgggatagtttgggggaacttgtagccagaatgccctgttcatgctgagcaaagttcagcaagtagagcagagtttggcaggcaggtgccaggaactccccttcttcctggagtgccttcattgaggaaggaaatctggcccttgggtttcctggttccactgctactgacccagaggggaatgagggctgagttatgaaaagataacttcatgaagacttaactggcccagaagctgattttcatgaaaatctgccactcagggtctgggatgaaggcttgtcagcacttccagtttagaacgcaatgtttctagagacatattggctgtttgttttgatgataaaaggagaataagaaaaggcatcactttcctggatccaggataatttttaaaccaatcaaatgaaaaaaacaaacaaacaaaaaaggaaatgtcatgtgaggttaaaccagtttgcattcccctaatgtggaaaaagtaagaggactactcagcactgtttgaagattgcctcttctacagcttctgagaattgtgttatttcacttgccaagtgaaggaccccctccccaacatgccccagcccacccctaagcatggtcccttgtcaccaggcaaccaggaaactgctacttgtggacctcaccagagaccaggagggtttggttagctcacaggacttcccccaccccagaagattagcatcccatactagactcatactcaactcaactaggctcatactcaattgatggttattagacaattccatttctttctggttattataaacagaaaatctttcctcttctcattaccagtaaaggctcttggtatctttctgttggaatgatttctatgaacttgtcttattttaatggtgggttttttttctggtaagatttagacctaaatcgcatcatgccaacttgtgactttgagactattcatcaagaatgaggatatagtagccatgacatagcttgagctatagcctttaattccttactttggctatgggtggagggtgagtttgaagaggttctgattttcttgtaacctgggaaagccatgaccttgtgcccgattctttcagattgctttgggtaataaatattggtggtggtatctg

SEQ ID NO: 28860 - DNA, 185775 bp, Homo Sapiens
atctctacacttaagccatatcctctgctccatcaactagtttgccattttgagtaatgggatgaagggtgcagcactcacagcaagctgcacgcccaacaccatcatcctcttcttccaaaagaaatgcagttctgtttaggacagcaaggtgtctggctacaatcctcaggcttccttgtagctatgtgtggtcaggtaacatggtcctagccaatgagatgtaagcagaaatctactgaatgtagatttctcaatgcagggagagcaagtattttcctgattattattttttaaaggagcagctggcatgtgccttttgcactatgttcttaaaccctttttcctgcataaaatgtaaactcatggtctagagaaggagcagtcaacttcccagcatgggaatttcaaggaggattagtgggaagaagaaggcgccaccagactacatcctgactgcctgtctccagacttcttgttacataaaaagaaaaaatgaaataaaataaaataaaccctttacttgtttaagtcaatatttttcagatttaagtgatatatagtcaaatgtaaccagatcaataaacagagccacacttgtgacatgtactgacccagtaagtgcagtagacagtgacagttagtaactaccttaaataatctctgagaaagatgtcaggagattagagacagacaatattccacatttcaatatttcaaaagaaacatacagacctcccagcttaatcaactcctggaaaaattctaaacactattctctctaaacagagtcacacttctgaaagacattgtttactgcccttcaagtaaaagttcacttaactttggcagctcattgagcccaaattaatgcacaagccaaggtccattgcagcttagaaatatttctctgcttcaatattaagagctctcttaaagcactccttgatatgagaacaaactagtcatgagtgctgctcctcagaggcaaaattctgtgtgggtttgtggatgatgagggcaatacatgcaaagggctaggtccacaattcagttttaacatcgttgaaaagacatttaatgtgtgcagacactggttgagttatttacatagattatctcatttgatgcccacacctccaatgagatgcatgcttttattatccccattttatggataaggaaactgaagcatagagagatcaagtaacttgcccaagaagactggttaaagaagagcctcattcctaattcataaaaaccttagaaatctatcctttgtttggatctgataaccaaaatgagtgattgtgctgtaagtctcaaaacatcaaggtttattgagccagcttgagggtgcaccaggaaaaatgtgagtcacagaagcatctgtggctgtttttttcccaaagaggtgaacaggaggtttagtatttacacattttccttaaaaatgaggggtggtagtgagacaaataattatatatttgtgagactttagtggccagtaaatccacacttacataaaacaaggtgaacatttgaagaaaaagggaatggagaaagcaaatttcttggggagaggtaaataaatgattaatctcattttgtctttgttctgtacctgggacaataatctagtagtcttttgaaagggctggtttctgtttagcccttagggaataaaacctatgactgttagcgagggagggagtataatgaggcgtgtccaatctctcatcctgtcatggccatgaattcagctttcaaggtttctctgcagttcccctggccaagaggggctctgttcattcagatgaaggcttagaattttacttttatttctcagatccatctgtgcagctcagggaaactactaaggctcccacctccttaaaaattgccattttctcatgctactggtcactgacgccttggtttaatgctttttccttttttttttttcctttcttaaactttttttagagacggagtcttattttgttgcccaagctggggtgcagtggcctgatcgtagctcactgtagcctcaaactcctggccagaagtgatcctccaacctcagcctcctaagtaactgagactataggcatgcaccaccatgccaggctaattttcttactttcttgtagagtggtggggggtgcgggggggaagtctcactatgttgtccaggcttggctcaaactcctggcctcaagcaatcttctcaacttggcctcccactgggattacaggaatgaaactggcactttgagtttacagagacaacatcccctccacatttcatgtgacatatgtgcataacaaatggcaaccagcaaaactttagtacttggaatttcaacaatgttgagactgatctttgctttagttctttgaatgggtgggcctcaacatgactcattgtagccaagttgactcctgctcctcatagttgttatctattagtctggttgtttggttttgtacctcagattccatataggttaggtgctctatcagaaatgcatatggctgcaagttattgaaaagccactttagcaacacctaatcaaacagaggtttatttttctcacataagtctggtggtggctggacacagtggctcatgcctgtaatcccagcactttgggaggccaaggcgagtggatcgcttgagctcaggagttcgagaccagcttgggcaacatggtgaaaccccggctctacagaaaaatacaaaattagttgggtgtggtgacgaacacctgtagtcccagctactcaagaggctgaggtgggaggatagcttgcgattctcttaaccgcagcctcaaggtttccctaactttaggtgtcacatccataaccaaggcaggcattacaaaagaagataaaacatcagccaaatttgtccccttttctcaaaaaagcaaaagcttttctagaaacttccctgtaaacttatgtttagatcacatttgcaaaaaaacaaaaatagtcacgtggccactatggtttcagggttggctggaaacttgcatatttaggttttccactctctaggttagaggcaggcaagagaaaataaggctgggcatggaagtcaagttagccaaaccagtgactgtgacagattgcatgctatttattctcaatggataaagagaaaataatgtgattatctcataatgaaatcaatactaaaatgaccttgagggtcaatacttctacttgtaccggcttcttggtgatgtttgggctatgaatatcagtcctgacactcgactccaagccaagaaagaaattccaacgcaaatgtctaatattgagctctgacatgtacagagcttggaaactggcactcctttcaacaacaacaaaacattgaacaaacagaaaagcaatgacttatcttagaccaagagatttaaggccccagggcaacctgccagcaccaaatttggagcgataggtgaatacagagaatcagagcagaacttagatttcctgaagcagcagccactggagccaattaggtaggaaaacttaagtggtggttttggtgaattgcttgaggctgggtgtgggctagtttgaaagttgaaaattcctaggggacaaatcggaggcaaaggctacactttcatggcttttgccttcaggaaccccaccagtttctgacagtatatatcagagaatttctgcttcctgtttcctgaaggaggagcaggaagcaaccactttgaaatatattcagtatattctttgtaacaaatgcttgccctacgagggaaactacctttccagaaccattcctgacctaggaagggattattagccagtgctagtcctttttagccttcttatctcatctaaagggagaaaaaaagctaagaaataattctgaagattacagcccaggaactcaactaaaaatctgaaatttaatcataaaattatagaacatttcccttccctaacaccatgccactgcatcaacagtgctccagtataatagcaatagattacaatgggagagctgagaaacccagaccatttaagaagaagttgatagggaaacgcaaagacagcaaaggagacaaaaacaaagatactgaactaaagcatctggcacctacagctacagcaaacattaaacaccccaactcctaactgattaacataaaaagtcaaactaaaacctaattacctcagttcctattacccaatacattatacctgactttcaacaaaaaattgcaaggaatgcagaaaggcaagaaaaaacacagtctgtaaagataaagcgagcaaaggaaccagacttaaatataacagtgattttagaattatcagaaagtaaatttaaaataattataattaatatgtttagagcactaatggaaaaagtagacaacatgtaagaacaaatgggtaatgtaagcagagagagagaaagaaaatctccaagaaagaattgtaaaaatgatagaaatttttaaaaaaacaactgttacggaaacacaaatacctttgatgggctcaccagtagactggaaacagctgcgggaagaatcagcggaaagaaccaatgagattgaagatatgttaatagaaacttctgttaatcaagtttatcctaaagttgcctccttacatatttaagttcggcctaaaggtttttctgcacatcttgaactataacaagtggaggtataaaccaaccatagcccgcacctgtgccaatgactgaattttgactaatcaaatgtagccaactgtttgaaccctgtttaaataaagctaacaccaagctgtaaccaatccagttgtttctgtacttgacttctgatttctgtatgtcatttcctttttttgtctataaatcttcttccatcacatggctgcactggagtctctgtgaatttgctgtgattttgggagctgcccgattcaccaatcgttcattgctcaattaaactcctttaaatttaatttgcatgaagtttttcttttaacatttcccaaactgaaatgcaaaaattagatataaaaaaagaaacaaaatatccaggaactgtagacaattactaaaggtataatatgcttatatgagaatactagaagtaggagagaaagaagcagaagaaatatatgaaataataaaggctgataattttccaaaatcagtgacagacaccaaaccacacatccaggaggcttaaaagacaccaagcaggataaaatttaaaaaaaaaaaagtccacacctagtcatattatgttcaaatcacagaaaactaaaacaaccagaaaacatgaaagaagctacagaagaggagaaatttacctaaggagggacaaagataagaattacatcagaaatctcattggcaaccatgcaagaaagaagaaggtagcgtgaaatgtttaaagtgttgaaaggataaaactagaattctggatacagtgaaattatccttcaaaagcaaagaagaaatgctttctcagacaaaggctgaatctgtcaccagtagacctgccttgaaataaatgttaaaagaaatttttcggacagaaatgaaatgacataggtcaaaaactgaaatctacataaagaaaagagctttcaagaaggaataaatgagcataaaataaactctttaatgttccttaaccttaattgatctaataaatataactattttttcaaaataattatgttttgggtgattatagtatacggataagtgaagtgaataatagcaaaattttaagggacataacggaggaattgggaatactctgtaataaggtacctgtactacccatgaagcactatagtgttatttgaaagtggacttaattagatataaatatatactgcaaattctagggaaactactacatttttaaaagtataatcaatatctaagatctcttttattagagaataatataaaatgctcaattaaaaccagagaaggcagtaaaagaggaaaagttaaaaaagaaaccaagaacaagtgaaataaatggaaaacagttaaaacatggtatatatgaatctaactatattattatcataatcaatttaaatgtgaatggtctaaatacataaattaaaaaatgaataatgtcagaatgaattattttaaaagacccaattatgtattgtctgcaagaagcccaatttaaacataaagatatacctagattaaaagtaaagggatagaaaaagatataccatgctaacactaatcaaaagaaagctgaagtagctatattaatttcagacaaagcaaacttcagggcaaggacattatcaggaataaagaggggcattacataccgataaaggtgttaattctgcaagaaaacataaaattccttattgtatatccatctagcaacagtgtcaaaacatatgaggcaaaagcagacagagctgcaaagagaaacagacaaatgcactgtcatatttggagacttcaacacctctctgtcagtaatttacagatatagccaaaaacatcagtaaggatatagttgatgctgaacatccttatcgatcaacttgatctaatcaacatctatagactttattgtgtgtgtgtgtgtgtgtgtgtgtgtatgtgtgtgtcagtctcactctgtcactcaggcttggagtgcagtgggcaatctctgctcactgcaacctctgcctcccagcttcaagtgactctcatcatgcctcagcctcctgagtagctgggattacaggcatgcaccaccacacccagctaattttttgcatttttagtagagtcggcatttcactatgttggccaggctggtctcgaacttctggcctcaagtgatcctcccaccttagccttgcaaagtactgggattacaggcatcagccactgtgcctggcctgatatttatagactatttgatccaacagagacagaatacacatttctttcatgttcacatggaacattaatcaagatagaccacattctgtttcataaaattcaccttaaaaattaaaaaaacagaaatcaaacaagatattttcacagattacaataaaattaaactagatatttttagaaacctagaaatatgctaggcaatgccctcaaatatttggagattaaacaacacacttctaaataatatatggatcaaagaagatgtttcaagagatattaaaaatattttgaactaaatgaaaaaataaactttttaaaatttatgggatgcagcaaaagcagtgatgagagggaaatttatatatcagcaatgaacaattggaatttgaaattaaaaacataccattcaaaccagcactgaaaaacaaaatatttaggtataaatctaataaaatatgtacagaatctagttcaacaccttatgaaagaaatgaaaaatctaaataaattgagaaatatcccatgttcataaatagcaagactaatgttgttaaactgtcacttcttccctacttgatctatagattcaatgctgtctgaatcaaaatcctagcaagttattttgtgaatattgacaaactgactgtaaagtctatatggaaagacagaagatccagaataggcagtataatattgaggaagaacaaagttggaagacagacactatcttacttcaaagcttattacaaagttacagtagtcaagacagtagggtattgatgaaagaaaagagaaatactgttgttcctcagtatcatggggggaactggttgcaggatgtctgaggataccaaaacctgtggattctcaagtttcttatataatacgacgtagtgtttgcatataacctatgcacatcctcctcctgtatactttaaatcatctctagattatatataatacctaacacaatgtaaatgctatgtaacagttatactttattgattttttatttgtattatttttattgttatattgttatttttaggggattttctttttgagactgagtcttgcactgtcgtcagggctggagtgcagtggtgcggtcttggctcagtgcaacctctgcctcctgggttcaagtgattctcctgcctcaccttcctgagcagcttggattacaggtgcccgccaccatgctcagctaattttttgtatttttagtagagacggggcttcactatgttggccaggccggtctcgaactcctgacctgataatccccccaccttggcctcccaaagtaccaaaattacaggcatgagccacccctcctggccatttttaggggatttttaaagaatatttttgatctgtcattggttgaatctgttgatgcagaacccatggatacagagggccaactgtagataaatggaacaaaataaagatgccagaattagatccatacaaatacagtcaactgatcattgacaaaggagcaaataattcaatggagaaacaatggtcttttcaacaaacggtgctggaataactggacattcatatgcaaaaaacaatctagacacagaccttatatctttcacaaaaatttactcaaaatggatcatagacctaaatgcaaaacacaaaactgtaaaacttctggaagataacataggagaaaatctaggtgaacttgtgtttggtgatgactttttgggtacaatgctaaaagcacgatccctgaaaaaaactgaacagtcgaaattttttcattacaaatgtctgctcaatgaaagacattgttaaatgaatgaaaagacaagccactgtctgggagaaaatatctgcaaaatacataatctgataaagggctgatatctaaaatatataaagaacactgaaaaatcatcaataaaaaaaacccaatgggtaacagatctgagcagacaccttatcaaagaagatacatacgtgacaaacaagcataagatgcccaatgccatatgtcattaggaaattgcaaactaaaacaataagattctactatgcacctattaaaatacccaaaattcaaaatactggcaacaccaaatgttggcaaggatgtggagtaacaggaagtctcactcattgctggtgaaaatgcaaactgttacagccactttggaagatcatctggtaatttttgataaagcaaaacatagtcttaccatatgatccagcaatcatgctccttggtatttacctaaatgagttgaaaacttatgtccatacaaaaatctgtacaagaaagtttacaggagccttattcataattttaaaagactgaaagcaaccaagatgtctttcaataaataaatggataaacaaaccatggtatatacatacagtggaatactgtgcacaataaaagaaaataaactatcaagccatgaaaagacacagaggaatgttaaatgtatattgctaagtaaaaaaaaaaaagcagtatgaaaagactacatactatatgattccaactctatgacattacggaaaaggcaaaattctgcagaaagtaaaaacatcagtgattgccaagggttggttgcaggtagaccagatgaataggtggaacacaaggaattttttaatgcagtgtaattgttctgctgacactgtaatggtggatatgttatgcttttttcaaaacccacagagctatgcaacacaaagagtgaatcttaatgtaaactatagactttagttagtaataatgcatcagttgtaataaatgtacaatgcgaatgcaagatgttaataacaggaggaactgtaggggaggagggagattaggaagtacatagaaactctctccactatctgcttaatttttccataaatgtaaaactgttctaaaaaataaagccaattaattattctttttctaatatctcatttgaatgagaggtcatggttaaaggaaattgtcagagaaagtgtcaagaaagaagtgtgactttagctgggtcctgaagggtacataagatttgagagtcggaaagggcagaaggcatttcagctgggtttgagccatggaaaagactcagagggctcaaattgcgaaggagcaggaaatagcacagaataaatcaatgcaaagacaacaggcagcaatttaatggaaaccaagggccaaggcagggctagaaacactgaagcatcattccaatatcagataaatataggcatgagagctgactcaacctcggccgggtcctcaacacatattcgttcattcatgtaatatttagtaaacattcactatgttccagacactgtggtaggcactggggacaagcagtgaataaaacaaatggaaatctttgttctcactgagcttacactctagtgaggggagagagacagaacctgtctgctattttcaagaaacaacaaagaaaacattatggctggaatgagaaacaatggccttttcaataaacagtgctggaataactggacattcatatgcaaaaaataatctagatacagaccttatatcttttgaaaaaaatttactcaaaatggatcatagacctaaatgcaaaacacaaaactgtaaaacttctgaaagataacataggagaaaatctaggtgaactagatagatttcatgcactggaatgaagtgaagggggaaagtagaaggtgagatagcggagataacagaagtcagagtatatagggcactgaagccagaataaataatgactctggcttttactctgagagatgtagggagtcactgggggattgtgagtggcagagtgacttgattgacacctcaacagggtcattctgtcttctgtgctgagaactgtcagagagggtacaacagtggacagtgactgcagggataccagcgaagaagttgctgccataatgcaggtaagagaatggaagcttggactatggttttagctgagcaaatgatcagaaacagagtctggattctacaatgatttgctgatggatctgatgtgtgaaagagggtcaaaatgtctcagttttaggcttgagcaacgaactggaaggcaggagctgcctgtaacgagagacaggagagaaagagagagagagagagaggactttggaagagcaggctcatgatcaggcctgagctcagtgtctgaattcaggtaagctatcttgaaaggggaaatatcaaaagctagagatcagagtaaggctgagactcagagtcaagtggggaagactaagttgcagtatgtactggcagtgaagataagtatttattcattcattgaacataccttgaaatcaaccacttttaatgtgccagggacacaaagatagaaaagacatttgccctgtctggaaggtactaataatccaataaggaaaacagaaatataaataaattattctagtacactaaccatcatagtagaggtattcaacatttgttgagtctctgctatatgccaagcagtgtaatgaggaagcagagggtatgcacaaagttctacaagagcacaaaataagttctggcaaaggtttgtaaagacattcacaagggttttcaccacagtatgacttcagggagttggcagtaacctagatgcccgatcagtagggatatgtatgaataaaatttctggcatactcggtagcaaactaggtgtacacacagcaatgtgggtatagctcaaaaacagactgttgagtaaaacagtgggaaatagagatttacagtccaataccatctctgtaaatgcaagaggcataaacaaaacattatctgtgttaaattatcaaggatctctatcgaacatattgcagcttgtgtctagaagaatgagagtggggatcgagaaagatgaggaaaaaataatataaacactataaaataatgtaaacaaggaccctgtagggactgatatgacaatgtgctgaaaattgaggagcaaagttaactctctgtacctgagataaaataactagctaataggaatccagctgaaaaccttaaggtgcagggcctctatggggcccaggaaggatgtgtagagacatgaacggatgaaagtgcatcacaggttcagggaacaacacaggttgagtgtggcttgtagtaaaaatggttgtgaagagttgacatatttttaagccctgggtaaattgaacaacagcttacacttggaggggtataatcattctaatcaatgtgtccccttttactataatacattggagttgcagctaatgctctgctcccattcagcctatgatgagattctctttcagccctattgggttcttggcctcatgtgactactccaaagaccctagtccaaaaggtctttcctgtttgctatggccttgaggaatgtggccctagatccaccgctttaaagctggagttccaccagcagcaacatcctctcattctggggcacctgcctggggcaggtcatcctgcctctgccaactcagtgctattagttaactctcacctgccatattccagctggaatcatctccccttctccaccccagactaggtcatgttccgccatcatggaagcgcctattcttcataccccttatcacagctgcaactactcatttacttgtctgacaatttgatttatgtccacctactttgctaggtactaagttcaatgctggcagtcgtttcttctttttttttcttttctgttttgctcaccgatttctcgttagcacttagcacagtgtctggcacacgatagatgctccgtcaacttctcagttggataccagcatcccgaagggaacatggattaaggcagctataagcacggtgtaaaaacaggaataagaaaaagttgaggtttgtttcacagtggaatgtaaagggttgcaaggaggtgcatcggcccctgtggacaggacgcatgactgctacacacgtgttcaccccaccctctggcacagggtgcacatacagtaggggcagaaatgaacctcaagtgcttaacacaatttttaaaaaatatatagtcaagtgaaagtatgaaaatgagttgaggaaaggcgagtacgtgggtcaaagctgggtctgaggaaaggctcacattttgagatcccgactcaatccatgtcccttaaagggcacagggtgtctccacagggccgcccaaaatctggtgagagagggcgtagacgcctcaccttctgcctctacgggtcacaaaagcctgggtcaccctggttgccactgttcctagttcaaagtcttcttctgtctaatccttcacccctattctcgccttccactccacctcccgctcagtcagactgcgctactttgaaccggaccaaaccaaaccaaaccaaaccaaaccaaaccagaccagacaccccctcccgcggaatcccagagaggccgaactgggataaccggatgcatttgatttcccacgccactgagtgcacctctgcagaaatgggcgttctggccctcgcgaggcagtgcgacctgtcaccgcccttcagccttcccgccctccaccaagcccgcgcacgcccggcccgcgcgtctgtctttcgacccggcaccccggccggttcccagcagcgcgcatgcgcgcgctcccaggccacttgaagagagagggcggggccgaggggctgagcccgcggggggagggaacagcgttgatcacgtgacgtggtttcagtgtttacacccgcagcgggccgggggttcggcctcagtcaggcgctcagctccgtttcggtttcacttccggtggagggccgcctctgagcgggcggcgggccgacggcgagcgcgggcggcggcggtgacggaggcgccgctgccagggggcgtgcggcagcgcggcggcggcggcggcggcggcggcggcggaggcggcggcggcggcggcggcggcggcggctgggcctcgagcgcccgcagcccacctctcgggggcgggctcccggcgctagcagggctgaagagaagatggaggagctggtggtggaagtgcggggctccaatggcgctttctacaaggtacttggctctagggcaggccccatcttcgcccttccttccctcccttttcttcttggtgtcggcgggaggcaggcccggggccctcttcccgagcaccgcgcctgggtgccagggcacgctcggcgggatgttgttgggagggaaggactggacttggggcctgttggaagcccctctccgactccgagaggccctagcgcctatcgaaatgagagaccagcgaggagagggttctctttcggcgccgagccccgccggggtgagctggggatgggcgagggccggcggcaggtactagagccgggcgggaagggccgaaatcggcgctaagtgacggcgatggcttattccccctttcctaaacatcatctcccagcgggatccgggcctgtcgtgtgggtagttgtggaggagcggggggcgcttcagccgggccgcctcctgcagcgccaagagggcttcaggtctcctttggcttctcttttccggtctagcattgggacttcggagagctccactgttctgggcgagggctgtgaagaaagagtagtaagaagcggtagtcggcaccaaatcacaatggcaactgatttttagtggcttctctttgtggatttcggaggagattttagatccaaaagtttcaggaagaccctaacatggcccagcagtgcattgaagaagttgatcatcgtgaatattcgcgtccccctttttgttaaacggggtaaattcaggaatgcacatgcttcagcgtctaaaaccattagcagcgctgctacttaaaaattgtgtgtgtgtgtttaagtttccaaagacctaaatatatgccatgaaacttcaggtaattaactgagagtatattattactagggcattttttttttaactgagcgaaaatatttttgtgcccctaagaacttgaccacatttcctttgaatttgtggtgttgcagtggactgaattgttgaggctttatataggcattcatgggtttactgtgctttttaaagttacaccattgcagatcaactaacacctttcagttttaaaaggaagatttacaaatttgatgtagcagtagtgcgtttgttggtatgtaggtgctgtataaattcatctataaattctcatttccttttgaatgtctataacctctttcaataatatcccaccttactacagtattttggcaatagaaggtgcgtgtggaaggaaggctggaaaatagctattagcagtgtccaacacaattcttaaatgtattgtagaatggcttgaatgtttcagacaggacacgtttggctataggaaaataaacaattgactttattctgtgtttaccaattttatgaagacatttggagatcagtatatttcataaatgagtaaagtatgtaaactgttccatactttgagcacaaagataaagccttttgctgtaaaaggaggcaaaaggtaaccccgcgtttatgttcttaacagtctcatgaatatgaaattgtttcagttgactctgcagtcaaaattttaatttcattgattttattgatccataatttcttctggtgagtttgcgtagaatcgttcacggtcctagattagtggttttggtcactagatttctggcactaataactataatacatatacatatatatgtgtgagtaacggctaatggttaggcaagattttgattgacctgtgatataaacttagattggatgccactaaagtttgcttatcacagagggcaagtagcacattatggccttgaagtacttattgttctcttccagcaacttatgatttgctccagtgattttgcttgcacactgactggaatataagaaatgccttctatttttgctattaattccctccttttttgttttgttttgtaacgaagttgtttaacttgaaggtgaatgaagaataggttggttgccccttagttccctgaggagaaatgttaatacttgaacaagtgtgtgtcagacaaattgctgttatgtttatttaattaagtttgatttctaagaaaatctcaaatggtctgcactgatggaagaacagtttctgtaacaaaaaagcttgaaatttttatatgacttataatactgctgtgagttttaaaagtaaagcaaaagtaaactgagttgcttgtccagtgggatggacaggaaagatgtgaaataaaaaccaatgaaaaatgaactgctgtggagaagtgttacatttatggaaaaagaaataggaaccttgttcatcaaattgatagaaaagcttttaaaactaaacaaatcaaacaacttgagtataatggaattcagactttgatttgcctaacataaccaccatatttgcaaggacagctctctatcttctggtgtttattcttaaaaacttaaaagttagatttagcgatcaccagagccactacttttatgcttaggtatttgtttgacttagaaaaaattggtcacgtgtaccactttatagtgccctgcaggtgttaagatatgaaggcactttgacttacacctcataaaatctttacaaagtattttctaaatgaataatgatgaaataaagtctttattctaggtgcatctgccccacataatttgttttctttggactagaagttttgatgtgttgagaatggtaatgaattaactccattttaaatgtagaatgcgtatcactccaatatgaatgccctaatgaatcctaagatttgtaggttttgtgtactagtatgaaaattactaaagatggaaaaatcacatgttggagacataagatacaaacctttttgttttctgaaaatacaacctctgatttctgattccttgttgtaatatggtgtaattatactagattgtaattttgttgttagattatacttttttaagttcagtgtttgaggacagactttcatttggttagtagtattatggcagctagcagctaaatatgataaagtgtacaatcaaaaggatatttttaatgaagatattagtggtctaacatgtcatttcagatacatagctgaaatgtagtaaaatcagttttactacaaataaacttgcataaggtttataaatttataagtttataaatcaacttgggtaaagtgtaaataaacttgcactcgtggtttctctgaagtctcctgagctaactttgcataaaggtgttattctgtacttcgaggaagtgaattattggggtcaaccacattttttttccttcctacagtctgattgccctttttagtttttaggatctttgtggctgcatcatttttccccttttgaactgtgcattttctaaccccatacttaaatattctcataacctccaaattattaattagatgcaacattcagtggtatattactggagtttctgatttctgcccactataggaatgtgcttcctgagaagattgggatcgtgattataataatagttaacaggggatgagtactttctaggtgccaggcactgttctctctgatactttatttgatgtattgttgttattcccattctttaaatgatgcacagagaggttaggtaagtgacttactaccaagtgtcagggccattaagggtcaggattctgaattcctgaaatgatgaaatttagcttgaagaaattggtttgatttcctgcttagttttcaatttcatggtggtctttgattgtattttgtgctataacactgccttagcatcctataactatagttacagtgttatattaccattttttattgttaatacaaagccatcatgaaataattcagtttatgtgccagctttttttgttactaattcttgaaccttggcgctgtacttcttcatgtggatgcctgttaaggaaagataaagttagaaatctttgaccctgctaggaaatttgtctttgttatattgggagctcataaaactgaagtattcaaaagttagaatacatacacacaagaaaaattagtaactaatttaataatgttttctttgcacatgtctctgttgtcttttggtcagagtgaagctaaatgtgtttttcacataatttgtagcctatatgaagtcctggacatgtggtatggttggaaggactgttgatgaggtttattgtctctctttattcttttatgttgttagtgtccccatacaacggggcggggggagtggggacaaaatgataacttgctttatatatgaagccttgggtttgaatcatactgttatcacatttcctatgtccctatcctgtctcctgcaggttttctttcttggttttcttttttggttttctttcttcctttcttcctttcttttcctttctttcctttcttccttttttctttccttttcttttttcctttctttccttcatttctctcctttgctcctttagtttgtttctttgtttctttggtttgtttctttgtttctttggtttgtttctttgtttctttagtttgtttctttgtttctttgtttctttcaacaggtctcactgtcgcccaggttggagtgcagtggtgggatctcagctcactgcaacctccacctctcgggttcaagccagtctcatgcttcagccttccgggtagctgagattacaggcatgtgccaccattcctggctattttttgcatttttagtagagatgaggtttcgccatgttggccaggctgatctcaagttatctgcctgcctcagccctccaaagtgctggaattacaggcatgagacaccgggtccagcttccagcaggttttctttaggagggatattttacaatgctgtaagtttttcctaacgagaattatcatagcactacatgttctgtcttcagtaagtgatacaagcttactgatgatgttgtagttatgttcattggtggtcgggtgtacattgaaactttaacacataatagcctctcctgtgagcagtggttcctgttggtaagatactttactaagggaaggaatgtgaggtgtcgctggggagagtttacccaaataaggatggactttctgtctttgtttcatcagtcctggtaatagaatgtttgaatagatagctctaggcattacatactttcataaatatgattattgtaattacctctttggcccagttgctagtaaattagggaccccttaatgatttatttcctgtttattcaccctgatgaagaacttgtatctcttttaaactgtactttatcgcctttctcaaattccaagattctcatcacattttttttcttcccaaactctaaataaccttttaatattaagtatctttgtggaaacattgttttctttttctatcccaatttttaaagcttttttaaaaaaaagagtgcttttgttgggatgtacattttccaaatgcaaaaacatttatgattctgtgtctcttataaaatatgacactctctacttttctctcatttatttagtgccacctatgtgtgtaatttcattacccacagcagtcttaggaggctggtcgagttccttatttgcagatgaggaatctgaggtccagagatcacttcttggtgagagtctcacagctattaagtattagagccaagattttgaacgtaggtctgattcacagcaaaaccgttaaccactaagtacactgactccagtaagagccctagtcctcacccaatacactttaattcccctgtgcattcattcaaattcattgaatttgctgcctttggaaacctctcaggaacctcctcaacctctcttctctacagacatcagctttgcctgataggtagggatcatagcaaaacacagttttccaaggtggtgataggtggagtgatagtgctctggagatggccaaagaaggaaggtatgagtgtatctgtgggtgggtgagtggtggataaggggaaggacagagccaaaagcgacggctattggaaaaactatgatgagaaacaggaagatggaaccttgttggaattagtgaaagaccttagaattcacaggaggtatttgtccttcacgcgagtgtagaccaaacgtaacctatgagtttcttttattccacttattaaagcagcaaccaaaggtattatataccttctgtattcacttaaaatgactgattttgaaaaagtcatgcaaacatccatttacagataagcctcattaactcaaaggcagtggccctgttgggctctgatgattactcaaaccatttctgacactctgacactacatccggaaatcatccggaaatgcattcagagcctgcaaaagctttttttttttttttttttttttttgaatagctacagcacttgcagatcttcctcctttgagagaatatttgattttaggaaataagcaaatgtagataagtatgattcaactgggcaataacttttaggcaaagagaaaaaaacaaaatatagcaatgtagtaataaggctgatattatagtgcttttatgatgagtctgaaaacagtctccaacatttgtaaatgttttaaatcgggtctgtctactacagtagcccttaagccatatgtagctattgagcacttgacatgttgcaagagtgaattggagactgattttaattttatttaattttaatgtaagtagtcgcacatgacccgtggctactatggtagatggcatagttttagacaagggcagtagtcttgggtagatacttgatttacttagaacatttctttacctagctgtaacaaggttctaatagctgattaaaggacaacatttttagcatgtaatatacagtaaggaactaatgttaattactgccaagatgtataaacattatgaaaccttaaacaaggatgaacacagaagcagtggcccttctttgtaaataaggggtcagttacttcctaataggtgtcttagttttagttaataatctaatagcacccccaaaaagcaaactgttaatttgttattagccatcctgtaaagacaagggagaaatcggggccaggagagtcctctttcccattctccataatttttacgacctatagaaataagagcctaagagtgaccagttcctgcaacctaactcaaaattaggcctctctgttgaagtaatagtgaggcaaacaatcccttgaagcactggggcatgcacccttatgaaatctaataattctaaaatatcattggcagtattaagctagagttctcaaaatatgctgtagaaaatattggtcatttaaatatagctgagtaaaaataagcaagatcaaaatgataagaaaatgttgatttctccccttttgaaccagtaactaactataagggtatatacccatgcttaacttaaaaataattatttagccaccttgggtatagcacaacatatggatgccattatagtccaccttgatcttacaaggaagctttcttttagcgtagctttacttttatttaagcattattgaagaagcttggtatctctgtttaagttgcttctgtatcagtgttttccagggccctgtctcagcttccatagttttccttaagagcagctaattaatgcttcactccatatgctttaatttgatattttgggaagtttcattttttaaaataatctttttatatcataggcctttgaagacatatttgtttacaaagacatctgcattgaaccatttgtttttaaaaacatgtatcgggcatgtcctatataccagaaactatgccatttactgaggacaccgaagttagagaatggtcttaatccgaactagttattgtctcactatccaatatggatatcaaacattcagcgtcatgaggatttactactgtgttttctcccaagagttttataattttagctcttatatttaggtctttgatgcatattcattgatttttttttgtatgcagtatgaggtaaaggttgaaacgtattctttttgcatgtgggtgtccacttgtcccagcttcattttttgaaaacactatactttccccattgaattgtcttggcttctttgttgacaaaggatttattatttctgccacaacccagctgtttctcactgtctaaacctttatgcctgctgccccgtaggcttagtggaatgcctctccatcctccactctcttttgtttagctagtacttccttatcctttaaggggtcagtaggaacctcaccttcttcagtatgttttcctttgtcttatcaacctaccaccatcacccacacacataccttttccctaaggctgggataggaacctcttaggcaatgatctatttgataagtactcactgagttcatactagacactctgcagtatatccgtaaatgaagtaaaacctgacaccaccctcagaaaacttactgttagtgagaaaatgggctataataatagagtggggtaagtttattgtagggataagcataggatgctatgagaatgcagaggacaggaatttaacctagacttctcagttctcccgttgaagttgacatctgaactgaaatctggaagaccagtaagagatagctatgtaaaaagaggggaaggacaataggaaagaaggaatggagagaggcccagaaactacagagtatggcacaagtagtttagcattgttgggtcacaaattctaaggatatgaaagataaagttgaagaagtggtggggctggggaggacagctcctgtagagccttttacagcgggagaaggagtttggctatggtcctgcaggcagggagaaaccactgaaggggagaaacatacagaataaatttgagtaagaagcttaaatctccccaagcccttttaaaataaattaagatataaagcctttgggtttctttatgctttgtcctattcttctaattgtccaaaacaaaacaaaaaccttccttttctgtacctattaaaaggttaattttataaagttacagacagcatgctgattaaagaattcttgataattagctattttgtctgtctttgtgtagattactaacaattgtgtcatcagatttaaaagatctaaacctctggactttatatattttttctacaagtactgtgagattgagaacttaattcaactctagtaactggactttttagtgttgtttgcagcatatgattgttaaagaaagtttagtatatttgtgtgtgcgtatatatatatatatagatagatagatagatttgaggttatatttaatcattgactattggtattctaagattttaaggagagaaaggtaggttacaatatatggctgatatatggttctggaacaattttcttagttttcagtaattctacctaaaatgtacgtccagctttgcactcactaccacattgtaatttccagtatacttgtctatttttcgagatgttgaaatctgtggagaattttttctcatgtttagtgttttagctatgtttatctctagggtatagcacatacaaggtggcaatatagatgtgcttaatgaataaaatgatcttcaaaaactgaccttcatttgaagttctattttattcataaacacataaaacgtttggtatcactgtaaaatttaactaaaaacaaaaactatctttaagctcacaagttaatttaacgttttttcttacacaggcatttgtaaaggatgttcatgaagattcaataacagttgcatttgaaaacaagtaagtgtctcgttatataattttaatgatgaggttctttaatattttatgctaattctattcttcattttttaaaaattcaagtccagtttgagtgcttttcaggaatggatcttcatgttactgactgagaagtttctgaacaactcagtattaaactaatggaatgactgtttctgctaatgtcctggaggtcccttattgtatggtattgatccttacgtcttaattcccttgaatgtgaagaaagaaaccagagagtcttgtgtattagtaactggaagttcgcataggagtatttgtaaattttaaaaagatagtaatgaaaagattcatgggtattgctaaaaagttgtatgtgagttctttaacattaaatctaaaactgatggttttagttgtctagtatattttatggaaacagtcatgtttacctattatctgattttttttaatgtttcatatgttcagcaatagcagtagctgatcttttctgttctcttttgctagatgaagaaataaaaacagtcataggcctaggaatattaactgtatgaaagcatcaatagtatagatgttaacattttattggagaacacaagtctcttgactaaatgttttgaatgctaataaaggctattttcagggtagctgttggtaagattgtaaagtacatataaactccttagtcaaagtgtagatgtggctatgatcttaggattttactaaactctgatggatggttaacagttatcatttttttggctcttatataccaagaaaattaataatatatcaaaagcaggctgcaaatctatagagacagaaagtagattagtgattgcttgtgctggggctggtggggagaacatagctaaagagtacaggatttttgtgtgtgtggcaatgaaaatgttgtaaaattgactggtaattattgcacataactgtaaaccttctataaaccattgaattgtacatttaaattgatgaattataatgatatgtggattatgtctgctaaaatgtagtatgtgacccaggcatactgagcaataaatacacacatcttgcttctaaagtttaaaaccaggcctgtgtttcagtgtctagaaaatatatttcataattgaacttagcagattcttttggctagcaacaggacaaagtagtatccttagatgcctgaaacacgtgtagggggacagagataaaaggattaaaagcatctaaccctatttctggctctggactaataatcgcagaccaaaatacaagtttgaatagtagaatacctttccctgaatacataaagccaaaagttttagtatttgtctcttcgctgtttcatatatccatggctatgcaatagacaacagcatcacaccaacagaggaatctttgataacttggagggtatttttttcttacaattatacactttatctacttacttacatcactaggtaaatgctgtttcccataaagggagagttgtctttatttgctactcttttagtttttcctgtagtctataatctaaagtgttaagcaaacactcatttcctctatgcatttaagaatttgtctagtttatacattgatttattagatcacttctttttaattttcaatcagatttctaccataaacttaaaattatttcatctttggaccttccaattatttatctcctgtaccatatctgcatgaaagtttctcttcaagctctttgtcatcctgggagtttgaaatagatcattgattttcccttgtgttcatggagtatgtttgcaatacaacactgggtttgagcacatcaataggatttaataggtctccaccaaagtaatctctttgcccttccttgtgtgtttcctttttggttttctgttagaaacaaaacgaaaacagtgttttgtaaaacaccagattgtatttaccctttctttcctttcaatcaggaagaagctcctgttactgatagcagattgttttaggtgctttgtttttaggtgcttcctaaaccttccataaagcataaaggtgttttcatatttcacattttttaataaggaatttgaatttttatctgtatacacttaaaatcattattttttccttggaaccattgagttatatattattatatgctttaaaatcaaatttagcaatgaatgtataacatctattaggtgtgtataataactcagaggagggttcagttaatttaggccctaatcagatttccacaaattctgacttaatatttgcccgcttatataacagctcttctttaacaaaaacaagtacttttctcaatagaattttactaagaaagctctttagtaaaacatcgacattatacatacaacatatctcagtatctgctgatgaagaacaccaaaaagaacccagatgtgactgctccggaagttgaatcctcagtatttttgcaaagtttgtctttcagtattttatttgtgtgtgtgtgtgtgtgtgtgtgtgtgtgtgtctatatatatatatatttttttttttttaaagacaggatctcactctgtcacctaggctggagtgcagtggcatgatcatggctcactgtaaccttgaactcctgagcttgagctatcctcccacctcagcctcccgagtagctgggactataggcacataccactgcacctaatttttttttttttttaataatttgttgtaaagatcaggtcttaccttgttgcccaggctgctcttgaagtcctggcctgaagcagtgctcccacctcagcctcccaaagctctgggattataggcttgagccaccgcatcctaatattttatatttttatggatataaaaaataatttggtatctttcagagttgtttaatatcattttaaatttaaaaacataggcaacttaaactcctataggctgtctccatcgggtttctgtggtttaggagaccccaccatcccagtgcatgctgataacgtcatactgatcagcatccagctacccacagcaagaattgaccacctcgtgggatctaaaatttaaagggggaaaagtgagttgtgaattgctaatgtgctgatagccccattttgcttgggaattagagggcagtttttgtggtccttggaatgtggttaaaattcttctgcaagtggaagcatatttatattactaacaattactggtactaatattcaaatattgaaggaaatttctgttgtggacttatgtttaaagctcttagaagttgaaattattggaaagaagacttgttttgaaaatcataatgttgctgtattgtgtttagagaaatattccaaacgggagtaggctgctgtgctgcatgcagactttgctgaaatgttactatattgccgttatgtcccactcagcaaaaactgatgattttaaagcttttgcttcttgaaactagaaaaagaggggtcagccttaaccaaaagttgatggcagagtggtcattatttcagttaaacatgaaaagcatgttaaataattgtatgtttgcttatttacagctggcagcctgataggcagattccatttcatgatgtcagattcccacctcctgtaggttataataaagatataaatgaaagtgatgaagttgaggtgagttttccctgccataaagtcatttagcactgaaagagtggggttaatttatctgtgtttttttttaatactttgtctttaacactgtttaaattactttgagaattacagctggaatggacacgtgcttttgactaactcatcttattaataattcaaaatgatacatgatgcttacatttggctatttgagcagtactcagagcatgtatttgaaagtcactgccgcaagttcctttgcccactagtaattcttttctccttctctcaatttctgaatctttgaatagtatgttgtttgtttacaactgtgtccccattgtaagcaaaatggattatgaaaattaattttacacaggaaagaaatcatgctttattacaaaatagtatactagaatttctttaagtagcagtgaatcttcttggtatatttttaaaaacctacaagctttagtttatacatattggtaaaatctctttttcacaggttataccgtgaactacctgcttatctcccgttgagctctttgaccaaaatgtgctatggagatctaacatgtgaacagaaatgttgtgtttgtgatttctttctccattagaaattggttttgtatttaaggcgcttacagtgcctcatatagtttgtgtggtatcttctctcctttgtatcctttcacatactccattttgagctgcttctcttctttttctacaataataagcataatgccttactattagttaataatagttgccgttccatgaatatttgtagtatgaaggatgtcgctaagtagacatttgtgcaggtgaggcagagtggttctaggtcctgtccttcagttctttatttatttatttatttattttttgagatggagtctcactcttgtcatccaggagtgcaatggcgcgatcttggctccctgcaacctccgcctcccgggttctagcgattcttctgcctcagcctcctgagtagctgggattacagtcgcccaccaccacgcccagataatttttatatttttagtagagacggggtttcaccatgttggtcaggctagtctcgaactcctgacctcaggtgatccactcgcctcggcctcccaaagtgctgggattacagatgtgagccaccatgcccagctggtccttgaattcttatttgctgcactaggtagtaaaggtgtagcaaaaacaggacagaatcttctgcctttgatgaaatcacattccagtaaggatagctaatatgacagatgtgagtcttaaagaaaaaaaaagggagaggatgaaaggtgatttagggacaggattgctgtttcagagagtagtcagggaagatctctcaatgtccaggcctgtgtttttctctctacagttttaaagtggacataggatatagtgttatttattttccaaaaatgtaaccaatctctactaggtgtaagcagctgggcttggttttgcaagggatcttaatagggaacagaaacactgtgtatgcttagctgtccacttccccagaagactgtaagctctctgaaggcaagacccaggtctttggtctgtattaggagtacccagaatagtgtttgatggagggatgaaagggactttttctccccagcttggtcacttgacagatcgggaccaatgagataccattgctaggatgacctcactgtcttacacaccgattcgttgaggtaatttctctggctagagtagttgagaaagatggaagcaagagggaaaggtatgttaagttgtattcagtcactgtattgtgtgatcattaactttggttgtaaaagggagacaagttcgagcttttactctacttgtcagccctagactttgtacctctcttggcctcatgtctttatcccccttgtctttcttatttctcttttctgcttctgagtatccctgtctctctgtccatatatactctgttgtctcttttcctattaaccttgatttgctagggtcttcatgaaaggttccatgctgtacatcttaagtgaactttgaagtggtcatcaaagagatcagttagaagaactgatctgcagtgtgtgacagaccaggaaagtgatatccagaggattgccaccatgaagttgtcatttttagtggagaggaagcaggagaccagaaagtgaccaaggatctgtccatttagttccaggagatatgactgccagagtggtatccttagtgggctgaatgttcagtggtcttactttagtgaccaagcaacaagacagtagggcatggtcagtaactttcagtcaatttttgcttactaggataaagcaaaaataagcttatacatttttagatacattttttgtaacttgctgagtacccaaggaaagtgtgcttgtatttatgggcgtctattttcagagcactaattattgctgaattagaacagaaatataggaaaactgatttttacaaggagcttcaaagcaatctcaggtagtttctgattatgtatctctgcctacctcggggtacatagacagggttacaatttggttgaggatatatgacatgtggtttttaaagacacctaggggcattttaagaaaatttcctcgatatctgaaaatctgtagatttcaaaattatgttaatcatgaaatattctgtgttgtaatttttgtgtaggtgtattccagagcaaatgaaaaagagccttgctgttggtggttagctaaagtgaggatgataaagggtgaggtaggaaaatgcctatttaaatttttttcttatattgtttcctttttttaaacccaggttgtacattcccgtgtggatttctattttgaagtaatatctaattttgagtaatttaattaaaatgttttcactatgtgttcagtatgtttctgttggtcataaattttttcacatagattatttattttaaaataactgaatagggagaacttcttattcttactttaaaaattgtgattagaagtgacttttatttatttctcagttttatgtgatagaatatgcagcatgtgatgcaacttacaatgaaattgtcacaattgaacgtctaagatctgttaatcccaacaaacctgccacaaaagatactttccataagatcaagctggatgtgccagaagacttacggcaaatgtaagttgatacacaagaaatgctgagaacttggaagtgatatgcaattagtttagaagaatttctagtagtttaaaattttttaaactactagaaattgattttaaatttggtggactttggcaaaaatggtttggtttgcaagagcaatggagaaaaaacttatttaacttttcctacttatagaatcaaggcagccttgcgcttgtttaaacttacttggctatacacgtgtctgatgtacataatgtacatttgttttctaaactaactttgttcattctaagatttaaaaactgatcaaacaaatgtgataattctgtcataagtcacaaactataaacgatttctccgtttttttctcttttacctaaaatgttttcagataaatgtgtaataagtagagccaaagaagctttaaaaagtcatctcatcttacaatccttgatctggaataatgcttaaagactatagaagagacgcatttttattttttacagattttattaagtgaatacagtacgtttgatttggacatgttgttgaacattaaattgcagttcagaatacatagaaatcctcccttttctagagattgtgtatgtgtgtaaatttttgtgccttctggttcatgtacgtttccttctctccctcaaatcgtttagcagtttcttaccccattctccgtgatgtgcttatttcatattgcatgcctgtatcaaaacatctcatatgccccataaatatatatacctactatgtacccacaaaactaaaaattaaaaaaaaaggaaaaaaaaaggcctgcaacaagagaagaagaaagaaatcagataccctgtaggtagctatctcccaaaagttttcaatagttgacttaagaaaactactgacttgtatgtaactgaaatcaggaaacctgtagtgtagagtggttcccctgaatatgtctcttttggtaatctaagctgtatttcagaaatgtacagaaaaggagctaagcttctaaatggatatagcatattttgcataaatcaaatttaatatgaatccatgattcttgtatgtgtaaatctgcctgcatttatttatgtcagtagttggtaattattcatcttaatttttttttttaaatttctaggtgtgccaaagaggcggcacataaggattttaaaaaggcagttggtgccttttctgtaacttatgatccagaaaattatcagcttgtcattttggtgagcatttttgagttgtttatttttagtttaattcatctggggcaattgccttgataataatgttgttaatttaaatcatttagtccatcaatgaagtcacctcaaagcgagcacatatgctgattgacatgcactttcggagtctgcgcactaagttgtctctgataatgagaaatgaagaagctagtaagcagctggaggtatgtcactttccctagcactgcttgtaagggtacctaggaacgattaactgtatcattccacaacttgaatatggggagcttgtcatttatttactgcttcttaacaattccttaggttctatagttggaaaattgtacaaagcataatcatactaaagtttccatgcctgaggtttcaaaattaaacagcagcttatgtatattaagggacttctggtactttcacttttactagaagtttatcaaagttgctaataaaatgcggcaatgcttcttccatataacatgttgtcattaaaaatactagagaatatttaaatatctaatcatattcctctcattatgtatgtttatctttgtttaaaagggtatagaacttcttcattctaattggttgtcattctttaaaactcctgtcttcagattcccgccagaggctatttccctaacttactattttgtctcttaaggtgcattttatctacttttattaatcctccaataattttcatcaccatatatttgttttcattgataactatcaagtacgtccatccattactatagaaactaagtggatcttagatgaatgtgccagctctactatattcctgtcaaattccagagttcgtcatcattattcattagaaggaaaacaccacacatttgaaatagtaaagaaaaaaaggagttccaaactgcattttaggagaaaaggtagtcaagactgtgttcttataaaaaccctgtgaaatttgccacctgtcaacttgatgtatgatgctgaactcttagcagaaggggaaaagtttaatctccttttgccactttgttttttcttaaggccatggaggtctgtttaattggtctttgctctcattctttcttgatgtccctgtgttcatgattttgtggttccttcagtgattctctcataacttttagcccagagctgcctccttactttgattgtgagtattatgaaaatatactcatatgcctcttaaacatcgaattattcttaaatgatctatcatacttttggctaaccatttatcagtgaattatcaatgaaaaagaacgaaccagattaatgaaccaggactcaaaaaacatgacttcttgaaaagtcctagaattattttatagattttattactctagtctaaaaaaaatgggtattgcacttttaaattatttatgctagttgtattcattcattcaaattatcaggtctgttgaacaatgagaaactagtatgcatgcctatctttcttcactactaatattaaagagatttacatgttcctataagaaattcccatttttcaacatgagccactaatacgtttggttttcattaatggcatgctagaactgaacactaaattttgataatggtatttaaagacagtggttatccacaagtttgggatgtcagtgtaacttagtttcgtcatcactggatatttacaagtgctcatcataattgtggatccagatcacaaggtcttacggactctggtctcatgttagctttcagatgcttactaagtttttaatttttgacattttttgattattcagtttaactactgtaccaacaatttttgattccttaggttttgagggaggtgtcattttaatgtcatttcaacagaggaatgtttagaccacagtacctaatgatgttataaaaaatggcactgtttccagaaaatatatactgataccttttaataaaaatgaagcgaataaaattttctataaagatgatatttaaacatttttttacctaaataagtaacattgagtttgtcagaccgagtgagctggtttttactggggaacatttgacctgcttcttagttattatattgctgatgtcattggttaactaaggcagccttgtgataagttttcagcagttaccttggaaaatgtcaacaagttctttcctattaacaaaaacatataaaatgtcatagacctttagtaacctaaaaagtacttaggctgtgagaggtattttctaaaacctgttagttttaacctaaaactattaataatttatggacccctcatatacagggtcaagataatttacatggctggcctaaatacagttgtcgtaatagttgataaagtgtattcatcagacgtccatttctcttcagagttcaaggcagcttgcctcgagatttcatgaacagtttatcgtaagagaagatctgatgggtctagctattggtactcatggtgctaatattcagcaagctagaaaagtacctggggtcactgctattgatctagatgaagatacctgcacatttcatatttatggagaggtaaatattttactgcatagtttttttttccccaaacaagtatttcagctggctaatcttttgtcttaaaatgtttccccttttattaggatcaggatgcagtgaaaaaagctagaagctttctcgaatttgctgaagatgtaatacaagttccaaggaacttagtaggtaagtcagaagtatctgttgacatatagtacaacaactaagtttaggtaaacagtttatttatagtgatagaattccattttttcttactggagggtatcatttaattgaaacatagtctttgaaatatgatctgttctttttttttattatttaagttttagggtacatgtgcacaatgtgcaggttagttacatatgtatacacgtgacatgctggtgcgctgcacccactaacttgtcatctagcattaggtatatctcccaacgctatccctcccccctccccccaccccacaacagtccccagagtgtgatgttccccttcctgtgtccatgtgttctcattgttcaatcgatctgttcttacagcatacaaaaaaatatttgttaagtatgatgctcaaaggttacattttcagaaggtattcaaaagagattgcttttctagttcaaacctactaatacctgaaaggataaatcttgcccagccctcctgactgtataccttttatatcttaaaattaaataatttttcaaaatgaatgatatttggggactttatgatttgaaatagatttgtatttgatctttcttatgggactataaaatgatagcattcattttaattatctcagggttgaagatctgaacataggttacttaaatctaaaaagtcccaaagctagaagaaacttcagatgtctctgggactttctgcaaagtcaatagtaattctccattttgacttgagtagtgttttatcaccatcaccatcgtgagtatcagcaaatatttaggagctcttcaccaatactcctaaatgctgcagatatctttagtagaacatatcaaaaccaggtgcagttttatcaagaaagctacatatgtttttaatttgtaaataaaattgggacatactgcctatatgttttttatcttttaaacttgagatcatggccattttatataaagtaatacatgttctttggaaactttaaagaagaaagcaaggacttctcatacattctgtttacgtagtttcaatgctaatttagcctgcttttttgtcagcatagactcataaacatcttccttgtcattaacaaacactagaaatgataaatgtatctcccaaagaaaattagcttgaagataaagtgcaaatagtaggaaaataatgcagaagtgttagctcaactgtgtactacagacaactggagaaatgtgtttgtaatgttactaaggtaacttgcataccaattgtatgtgtacagaatgtatgcatagcgcaagataaagtgctaatctcaagacagttgggtgatgaataatatttattttcttctttacagcttgtcaagcaattgcataccttttgtagttagaaaggttattgtaaatttaggaattcttatggaaaaagagctggtagttgttttgttttttttttttaatagcaaatgagtagagaattatgtgtcagattcattaaagttggttttgaagatggcatgatggtagtggggaaagtgcttgggcattggagttggatctggatttcagtcctactttattctttggtggcaatgtgagcgtgggtcactgtcttagcccccctgagaattatttttcttacctatcaaatgtgataataggatccacctcatagagttgatgtgataattaaattggaagatatagtaggggacaattctggacacagtaggggactctgttcttcaccttattcaaaacaactccatttcagtagaacagaatcacagtaaattgctctttgggatttggaaataagtgtaatgtagaattggattatttgctattaaatattaaaagtagattctacctgtggttacctggaaagaagaggatctcagaaataaccagaaagactgctaaaagtaaatcagccttgtttttgttttgttgtttctagttagtaaaatgagataattctgttttagagatggtccactgcaacactgggaacgttggaacttttcagaaagcatttttgtgtaagattctgcaaggcagatctttagagaggtgtcataatcagttttgcatgtgttttgtttgagtcaaccaacgttatttgtgatctctatttttcacaaactctctttggtatgtgcactaatttatcttttcattaaaattggattcttcactcactaagaatgaattggtatgactattcagtcagctatagttaacacacagtacttaggataattaagatattatcttaataaaaacatccccaaatctcatttttcattttgttaactcacttagatctttattaaagtcaacattaattcatgaaaatgtaagtgttgcagtttaaaatcaaactgtgtgaagactccaagtagcttctctcacctcacctttccccttttcgttatagaagaacagaaataattgacagaaggacctagaccaagaatcctgatttaatggtgtcagatctgttctatgaccagtcaaagagtttctaggggtgaatgaggcagccacacacagcaagaatgtcaaagctatgctctgattacaagagccacaagaattttttgtgagaaggcttttcactgagttcttatctagcattggctcaaagcaaatttttgcttccatcttttcccccaactttgccttgagctttgcctttaaaggcgaaaaggaaaaaatggaagatgagatggtgagggcaagcacatggtggatgtggccaatgtaagggtacttaggtaccttgggtgagccctcagaatcagatgtagttcacatgtacatttccagaattagtaattcttaagtttgtaatgtcttgctttaccactcgtgtcatgatgcaaatgaaagcagtcattttccagtaatgtatatgattgtaaaataaataaggaaatgatcaagtacctattttttactggtacttgaaatcccaagttttaatagatgttactgaaaaatacttaaattggtttaaagctttttcattgtggttttgagttatcttaaagtgggttttcttaatcttttactctgtgactaatcccttcactttttaatacattgctaaagtttgtaagtaatgcacaggagtgatactctgttaacacattgaccttgaagaatttgtattccttttggatgtatgtatagctgcttaagccactttcagacttagattatcttttataaatgtgccttccatacagaattctgaaaatatttaccatggacaaagaagcagatttaaatcaggtacagacaagaattgaaagtgttgaataagtgaatatatttcccattctctctacttttttcttaattcttatagaactttgcagaaagaatgatacataccacagtaccagcaagtttaaagcgtacccttttgtgcaaaaataagaggttatctttgaactgccttaaaaatccaaaattaccctatcagtttgcaagtattaatcaactctggtacctgaccaaaggagtttaaacaatgatgtcctaattaaacagaaaaccagattaaccatcttgttgaaaagagtctctactttggttttgaaatcttacaattcaatacatacacatacacataaaaatatctatctatatgaatgtaatagtttacagtagggctgtgcttactgctttgaggtatgtgtttttaaaaccaaacttgatttatttatttcttaggcaaagtaataggaaaaaatggaaagctgattcaggagattgtggacaagtcaggagttgtgagggtgaggattgaggctgaaaatgagaaaaatgttccacaagaagaggtatgttacagtgcgaatattttgtggcacatataataaaagtaaaagttttttatgtgatatgttgaggacctctaatatgtgcataaagtgaatgcaaatattctgattatcaagcatgcctgctgtaattaatgttataattgtagataatggcccttctctgtcctctaatgcagtgagtttggattagtcactttattgaattcttttttcctgatctttaaaatgggtagttataaatttttaaatatgagacatacatcactgggtcgagtgttaatggcaatttaataaaataatatatatgtaaatgcttcgtaaagcactttgtaaatgttaatgttgctgacaaaagcaaaattggaacacaggttttctggctttcatcttttcacttttttagtgtggggattgtgtagtatgtgtgtttattctgtgtgctttaaatttatttctgtgcttaatatctcttccccatcctccttacctttaaattctgtaacccttttatcttcataaatatatgctttttgtagcagcttttaaagtatttgcatggggtagagaggtgaggatgcacctttctgtgcaatagtactcttaagatactgtctcatcaaagagccgtaattttcacatattgtctagctttctttttgaaagattcttttagctaaagttaaatcttttttttctgcgtacaatttgtattcggtaattttataaaccaaaactgtttataataacttacattttttaaaaatatgatgattgataacactaatagagctaaataaagtcttaaattggtcctttttttctcttttgtgttttctgttttttaccaaggaaattatgccaccaaattcccttccttccaataattcaagggttggacctaatgccccagaagaaaaaaaacatttagatataaaggaaaacagcacccatttttctcaacctaacagtacaaaagtccagagggtaagaattacttgtcactttgaattacaatacaagtaatttgtctcagatgtcacaattggtattttggatgttttctctggttagacttgtaggctacttatgttctattttttttccaaatgtaattgccagcttatgagatactacaaattagtgtgatacatacttttcaatttattcacagtaacaactcttatgccataaacacaaaataatggggttgcatttagtggtcacatttttcttttgacagtggactctcttttttccatgccttctctctttaaattttgcaggtatcgtagctcaaaatacaccttctgttagttgcattagttactacttgaaccatattttagaaactaattttctctgtttgaactaatctgtttagaaatgggtttaaaagtcctgcagtgaaagtcctgcgttcaggcttctgtgtatcgtttgttatagttaatgacatcccttgcattccttatactgctttaggtgttagtggcttcatcagttgtagcaggggaatcccagaaacctgaactcaaggcttggcaggtaggaaaacattccttgagaaatacactttcagtttatattttaatgtttattccccttgttaacaaagattacaaatgatcctcaggattagggactggagggaggagtgtttgtgggtatgtggatccattgccctggagttaaagcttaaacaccttcatgccgcttgtaaggcttttcctaattacttgtctagttatcatctttaaattatcttctcccttgcactctagagaaccttaagccatactgaagtactttgagttctctgaacattctcgtgcttattttgcttctagacatatgtacaggtttactctgcctggaatgctttttctcctccacatgtcacctcattttgaccttattccttacaaagctttccttgtgtacttgccgaagatccccacccccttgactggttcaagagccttccccttctgttttgcaatgtgctcacccctagcatagcacttaaacatagatgtttatttgttgatctcctcaaccacattgtaagttctttgagggcagggagagctggtgagaactgtttatggaaaaaaatgttgtggactcatggattaaaagcaaaggtgccattttacaaagaggactataacggcaagtggattggatatgtctcattgccgggcagcccattattccagaacacagagtaacttttttctggggtccgtactaaaggccatcattccattcttgcctttcttcattttaatttactattcaggtctactcgtgaagtgcttaaattagagtggcccttggggtactccagcagtttagacatgttgcaagaaaagatattcgtaaataatttgctccgaagtcaatctaactaaatctgttacataggattttaaagctattttggtgatatttgacccagagggaagggtgtagcattcattccatcacatggtattttgggaaataatacagttaaaggcttttgtaacaaataaagcttgttggagaaaaacccaacatgcagaaatgaattgccagttattaatttgcacaattgtttctaggtttccctataacttgtgacaagaagtagttgttttttttttccctcttaatatatatatatatgggctaggagtacagacatttagcatatgccttttaaaaatctgttcttatgttaagtagtgtccatagagagaagttcaaactttccttgtgattcagccttttaaaattttcagagtacattattgaaatgtgtatgggcttgataaaacttaatgcttgtcaatgtacctatttttttgtctcacagattattcagtgcatttttatcctgatgtttttgtttgtattttgtgtgtactctatttacttggttagcagaaatgatttactttttacttttgtacccttggtatttcattttgattttttttttaagaatttgatcggccaggcgcgatggctcatgcctgtagtcccgacactttgggaggccaaggcaggcagatcgcctgagcccaggaattcgagaccagcctgggcaatgtggcgaaaccccgtctctacagaaagtacaaaaatttagctgggtatgatggcatgcacgtgttgtcccagctatccaggaggctgaggtgggaggaacacctagggcctggggaggtcgaggctacagcgagccattatcatgccactgcactccagcctggataacagaataaaaagaccctgtctcaaaaaaaaaaaaaaaaaaagaggcggaggcgggcggatcacgaggtcaggagatcgagaccatcccagctaaaacagtgaaaccctgtctctactaaaaaaacaaaacattagccgggcgtagtggcgggtgcctgtagtcccagctacttgggaggctgaggcaggagaatggcgtgaacccgggaggtggagcttgcagtgagccgagatcccgccactgcactccagcctgggcgacagagcgagactccgtctcaaaaaaaaaaaaaaaaaaacaaaaaagaaaaaaaaaaaagaaaaaattttgatcaggataaagcctttcataaatgaattagagcatcttatactactcattttgtttatacatctcatggtaaagcttgtataattttgaattatacattttgtgattttgctgatactgaatactagtctttataataatctgatacgtttaaaaggttgctattgatctattcgtattcacagtagatgtgtaaagtagtatatcaactacttttgttttcatatattgatttatatttacagcaaacatttgtatacctgctgttcaccagatcctgtgctagggaattagtcgttatttgcatttttcagattaatctatcattacttttataggatcattgttgcaatttctttttcagggtatggtaccatttgtttttgtgggaacaaaggacagcatcgctaatgccactgttcttttggattatcacctgaactatttaaaggtgagaacagaaagaactttaacttctaatccttttgtactaaaatatacaaactttatagtagatctttcagcagttaggactcattctagcctgtgcaaaacactgtatgacttgtcaaaggtaatagagaaaatacgttgtttggcttataatttttttaaaaatggaagtctttataaatttaagtaccaatataccagttttcaataaaattttatacttccctttattcttctcttaaacccttacactcagtttaggcaatcctgtacatagcctgttaatccatttgatcctttctagcattttggttttttccagacaaaaatctgtgtctataactcttgcctttattgttccttttatgtcatttatcaaggaaatctaagcatttcatgaagttctttgtttaaatgtttaccctatttttctctttactgttattcaaaatacaaactatttgtgtcttctcataaatgttcagtttagttagtgtgatgcggttatgcctccttaaaatttcaaactggaagataggaacgaggaggctacaaggtgtagtggagcaagcactggatgggcaatgcagcaatttacttataagacttcagcaaatgaactagctgtgtgactttaggcaagtcacttccctacactagatgcttcttgaaattccttttggccaaaatgttctatactttaatgaaatggaaactgatctacttcattttcataatgttttatttgtatccatacatatcaaaattataatgtagctggtattaaatgtttttaaaaagcatttcaactctatttatggcattaagaatttttttgctgatttcttgaaagaaataaaaagtacatgatttctgcttgtgtgtaaataagaatgaaaggaagaaaaagtgtaatactgggcatgccattcattcttatggtggccagttaattaaaagtggaaaggtttcatccagcaaggtttacatgggtaggatacctctttgatttttttttaagtatgtttatgtgtaatctctctgtgtgtgtgtctctctcgtaattagcttaaatcatcatgaaggcctggagagttaggattgcattgtatcaaatcccttgttcttttgactaatgttctttcttagatcctttgatttattctcaagaatatcttctttggttatcagcagctgccctgttgccattctttccatcaccagaacttccctcgtttgggcctggcatctctcaccaaaaggtgactgctttgccccagtgggataacctggactactcttctgttttgcaagatattcctattccatgagctattactatacctttggaggaagtcactcactcagctgcagtctctcctttgctcaaattctatgtaaaacagattctggtgtaactatgtaaattgctaatgatggcagagcacagatgaaacggaccaaatccttacctgacctttcttttccagaagctgccacaaccaagattttagaaacttagctttacaggagcttctccaatgactgttcatgtagacagtctctatgataacctctgcttcactgagacgcctactactactatagttatgaatctgattccccgtagccagtaaatgagatgtttatgagtggattggaaggacagtggttagaaatgaggtttcatctggttttaacagaacccaacatactggaagtgctttttgtaagggtctgtcattggaccccaggtgtatatttctatcaactaaatgtatactgtttctcgtacttgttgtagcagagttgtagtctttaggaagttttcaaggcatgatgtaagacctagctgtctggtcagctattaaatagttttgttttcccctcatgaggaatagtcagcattttcagttgatgaaaaaatcattgttccttaaccatagtatatgttcttttaaaacaaaagatggcccaaactcaatgctttgtaaattaagatattaactggcaaatctattttaatcaagattatttacaatgtgtgattttttaaggttagctggttataccttgaatgtcatttatctatattcatacattttagcatgttttatttaatatcctatcatgaagaagtccccaaaatagcatatctgtgccttagcagtagaataattggataatagtgccaaattagacaactttaaattttattcagtataattttactgctgagtgtttttgttatatctctaattcttgacatcaataatctgttatctgtagtaattttctttttaaggagatcattcaatttcctgataattctgtgtaacagtgtttactgtaaatttagaactgaaattgaaatattccagtatatttttatctgatgaaaaggagaaaggttttattaagtaaaatgtcaaattatttttactgttatcttgtatattttaaataggaagtagaccagttgcgtttggagagattacaaattgatgagcagttgcgacagattggagctagttctagaccaccaccaaatcgtacagataaggaaaaaagctatgtgactgatgatggtcaaggaatgggtcgaggtagtagaccttacagaaatagggggcacggcagacgcggtcctggatatacttcaggtacaaactaagcattttactcagtaactttatctgttcctagacttatagctgctaatctctaatattcattagaaccccattataacaatttgccgctacatggtttccaattcacagtgggttaaattgtgttacaggagacatagagtaaaaacctgatgataaacacgtagagttcacagggccggtgcaagttctgttcatgctctgattgggggtaaatctgcaaagcccttgtgtgttgatgattttcttaaggcctctcctgattttataactgtatagtcaaaacttttttcatttgtgtactgtggctcatttttattttgtcaggtatgtgctggtcatacttgctggatggactgtgtaaatcaggggtctgcctcttgtggctcataaggtgattttgagtgacatggccaaagtcagccctaggcacagtcaagaagtaggcgaagtttctctttgccttcccagcttttctgtccgtgcttctttcttctctcccagtacctttcagtgaacctgatccccacctgccagtgcctactgtctttcttgctcaacagtgtatctcctttgtaacttgctaatgatggtataaggtataatccatttcacgcatatttgcatttcaaaaaggaactctttaagatggaaaagccttcaagatccacaggaatgaagctataatggtgaagctataattggtcattagctccaacagaggaagagagaggtagtagagctgatattctggagttggggagagttacctactcctaaggccaaccttgaacctaacccctaacccctctcccaacagtctgttctttttactcatgaatttctgcctcaccgtggagctctttttctccgctcctgtcctctaagtcgttaaccccttcaggcataatgaatttattatagtaattctttattaatgatcaattattgtaatgggagtgggagggcaggttgtggaccaaacatcaggcaagcatgtatctgccttcagctagatccaatccatgacccacaagagacccttccctgaagcagttgccatggtggcctcctttgccaccctctcagaaatgaccaaaatatatacattcccctctgtcctgggccaaatcttgctaaaaggagctctctttttagaggttttgtttatcagggtatcacacttaactgtcgtggataatcttttcctccagagagtatagatgtttaaaggaacacagctatttaatgatatggcacatcaaggtttgaacttaggtggctaataacatacctttttaaaaatgagaatgaaacatgtttataaccaaaattaacctcaaatattgcaaagcccttcattttgagtttaaaattttgttttatgaaatggaaagtgataatactcttggtgggcttataaattgggaagagttttggattacccctgaaacgtctctggaagcttctgttaaccctcttttttttttttttaaagtcagacaatggtatataacttttaactctcgataggaactaattctgaagcatcaaatgcttctgaaacagaatctgaccacagagacgaactcagtgattggtcattagctccaacagaggaagagagggagagcttcctgcgcagaggagacggacggcggcgtggagggggaggaagaggacaaggaggaagaggacgtggaggaggcttcaaaggtatggagatcttcattaagaaatcaaagtgaattgtaacagctgtcttgaagttccatgagaaatcctattgatgcaatgaactgttaccaagatcccatctctcccgttttgtgctgataccataggaaaggatcagccttccacttgtgtagaaagaaagaatattaggcagccttccttatggttcatacagatatatgaataaatgctgataactaattcagcatcttggtgggtctaaacagcatcccttcattaactcacattgacctgtagatgcagaattataataactgtgaaatattttctgttacttagcagcaggctagattattagccattgtgtaactggaatcactggggtattgattacatttcagattctgtggttggtttaaatagagggtgtgggaataaagaacttccagtaagcatttcagaatcagtaactgttgaaccttttgaaaatattctcataggaaacgacgatcactcccgaacagataatcgtccacgtaatccaagagaggctaaaggaagaacaacagatggatcccttcaggtaaaacctgtctgcctcttttcatcttaattgtttgaatatggtagtttgagatttatgagtttattttactttattaaaaacatgttcaaagattacaaatccagtttatgtgaaatattttaccttcaacattacaattgtagtcaatcttagttctttgtgacaagtatacaaataagaggatttctctagagaatatgcagtctgagtatttgtgaagaccttgacagccacactatgattttattatttattatttatttttatttttttgagacgggagtttcgcttttgttgcccaggctggagtgcaatggcgcaatctcggctcagagcaacctctgcctcccgggttcaagtgattctcctgcctcagcctcctgagtagctggaattacaggcatccactaccatgcccagctaatttttgtatttttagtagagacggggtttcaccatgttggtcaggctggtcttgaactcccaacctcaggtgatctgcccaccttggcctcccagtgtgctgggattacaggcgtgagcactgtgcccagccacactatgattttaataccacattggtagacctgcaatcccccagagaaggaacatcctgggatgtacttagagacctcagtaaaccttatgtgtctttgctcccccaaattaacagggatagggtattctctttgaatagaaaataaggaaaagaaggtgtctgtcttacaactaataatcatgatagacagagctgatgatattcagctagtctccatgcttggtcagtcatctgcttatttacagccaggacctagtccgaggatctcttctcaattggctgtcaccagtgctaaaccaattgttaaataattttaaaattatctcctgagcacatccaggcacctttgctaagtgctttgtgtatgttttatctcatttaatcttacagcaacccactgaggtagttttattattccactttataggtgagtgcactgtagcttcagtcctttgcccacagtcacatagctagcatatgtccaaatgatagtcaaaccttagtgtctgattctctgaatctatgttgtcgtctactttttctgtaacttttaattattaagtagttagggttccttcctgactatggattcatttgggaccatcacccaagattagtgagagatactttttaagacaaagtttatgatggaatatttcttggaattcatagcagctcaaagtaagtgttaactattggtgggttcttaaggaccagcatgtccaagggatagatagattggtaaattactgtatgtacctgtcttttacaaagctataagatatttaagtacccgttttgtaattttccacttaaactgatatgtttgatgaacttggcagtctaactgcattggttaaaaggatgcacatttatatttctaaatgaaatggaatactgaatttaaaaggtgatgttttctctattaagtatgaaaatagatacaaatctggccaggcgcggtgctcacgcctgtagtcccagcgctttgggaggccaaggtggtcagatcacctgaggtcaggagttcgagaccagcctggctaacatggtgaaaccccatttctactaaaaatacaaaaaattagccagacgtgttggcgggcacctgtaatctcagctactcgggaggctgaggcaggagaatcgcttgaacccaggtggcagaggttgcagtgagccaagatcttgccattgcactccagcctgagcaacaagagcaaaacaccatctcaaaaaaaaaaaaaaagggccaggcacggtggcgcacgcctgtaatcccagcactttgggaggccaaggcgggtggatcacaaggtcaggagatcgagaccatcctggctaacatggtgaaaccccatctctactaaaaatacaaaaaattagccgggcatggtggcgggcacctatagtcccagctactcaggaggctgaggcaggaggatggcgtgaacctgggaggcggagcttgcagtgagccaagatcgcgccactgcactccagcctgggcgacagagcgagactgtctgggaaaaaaaaaaaaaaagatacaaatcaaagtactgaatccttggtaacgagacatttaaaacacatgcacatacccactacttaaacatactttgaaattacaaccatttggggatgtttttagcatttgtgcttgaagtagatcaatatttgtagttgttttagttccatttgtcactgttaactttcatttgtacctctggaattagcagtgctgtattcagcattggcacttaaaatattttatagctcttagaacactattttttaaattacattgatctttatactctcctaggattccagtccttccacaaattattatatgcagttttctttatactgttccattcttcagacagagttcaggttgtaggatcatctgaattttcttagtgaaatacaagccagtagaaaccaaagctcgtgtttttctactgtatgactatgggagctctcagtatagagaaacttgatcatacctgtgatagatataaagatgtaaattaaagtctagttagtgagttatttgagggtaaagccagaataggaaaacattttgtttctcttttcctgggcttcacaatctttggagaataactaattttattttaactctagtgttagaggcatgtatgtcttctggtaatcagtaatagtaattcattttacctgtttgtttctcactgttttattctacttagaagaagacatgataggattgtgagtttttctctaactttggatgcagtgagatgaccagtgtgttccagttaaagaagaagagtgttttaaaatcataaaccaaataaagaatcctaccttacattaatttcttgcacttcttctgttctcatctccatttctctttttaacatgtggaatttacacttcaggtttaaatttcttgtcaggccaattacagattacagtaggatatggtctgtgtatataacaactataacttgttttagatcagagttgactgcaataatgaaaggagtgtccacactaaaacattacagaatacctccagtgaaggtagtcggctgcgcacgggtaaagatcgtaaccagaagaaagagaagccagacagcgtggatggtcagcaaccactcgtgaatggagtaccctaaactgcataattctgaagttatatttcctataccatttccgtaattcttattccatattagaaaactttgttaggccaaagacaaatagtaggcaagatggcacagggcatgaaatgaacacaaattatgctaagaattttttattttttggtattggccataagcaacaattttcagatttgcacaaaaagataccttaaaatttgaaacattgcttttaaaactacttagcacttcagggcagattttagttttattttctaaagtactgagcagtgatattctttgttaatttggaccattttcctgcattgggtgatcattcaccagtacattctcagtttttcttaatatatagcatttatggtaatcatattagacttctgttttcaatctcgtatagaagtcttcatgaaatgctatgtcatttcatgtcctgtgtcagtttatgttttggtccacttttccagtattttagtggaccctgaaatgtgtgtgatgtgacatttgtcattttcattagcaaaaaaagttgtatgatctgtgccttttttatatcttggcaggtaggaatattatatttggatgcagagttcagggaagataagttggaaacactaaatgttaaagatgtagcaaaccctgtcaaacattagtactttatagaagaatgcatgctttccatatttttttccttacataaacatcaggttaggcagtataaagaataggacttgtttttgtttttgttttgttgcactgaagtttgataaatagtgttattgagagagatgtgtaatttttctgtatagacaggagaagaaagaactatcttcatctgagagaggctaaaatgttttcagctaggaacaaatcttcctggtcgaaagttagtaggatatgcctgctctttggcctgatgaccaattttaacttagagctttttttttttaattttgtctgccccaagttttgtgaaatttttcatattttaatttcaagcttattttggagagataggaaggtcatttccatgtatgcataataatcctgcaaagtacaggtactttgtctaagaaacattggaagcaggttaaatgttttgtaaactttgaaatatatggtctaatgtttaagcagaattggaaaagactaagatcggttaacaaataacaacttttttttctttttttcttttgttttttgaagtgttggggtttggttttgttttttgagtcttttttttttaagtgaaatttattgaggaaaaatatgtgaaggaccttcactctaagatgttatatttttcttaaaaagtaactcctagtaggggtaccactgaatctgtacagagccgtaaaaactgaagttctgcctctgatgtattttgtgagtttgtttctttgaattttcattttacagttacttttccttgcatacaaacaagcatataaaatggcaacaaactgcacatgatttcacaaatattaaaaagtcttttaaaaagtattgccaaacattaatgttgatttctagttatttattctgggaatgtatagtatttgaaaacagaaattggtaccttgcacacatcatctgtaagctgtttggttttaaaatactgtagataattaaccaaggtagaatgaccttgtaatgtaactgctcttgggcaatattctctgtacatattagcgacaacagattggattttatgttgacatttgtttggttatagtgcaatatattttgtatgcaagcagtttcaataaagtttgatcttcctctgctaaattgatgttgatgcaatccttacaaatgattgcttttaaaattttaagctaggaaaagaaatctatagaaagtgttctgttacaaaatgtaactgttaccattggaaatttcacgtcataggaagttagcctttatctaccaactttcaagaacttgtttaataaagcgaaaaactcaaccaaatggtacaaaaccacagtgtaccattaaaatatgcactaagtctcttttttacaaaggctgtattcagcaaggcgctaacttgcttaaatgtgaattactaacttctaaaactgtactttgattcacatgttttcaaatggagttggagttcattcatattacaatatttgtgtgctaaacgtgtatgtttttcagttcaaagtcatgatgtttttaaaatcttattaaagtttcaaaaatctgaagattgtttatctagatgtaaatttttattaaaaagttgcacttatgaaaaagcaaaaaattagtctgacagatgtttgctcctggttttaaatttctacatttgacaaaaactaatgatatgtggggggaaagttgtgcaaagtaaatgtatgttgcaaataatcttttatgagcccttaaaaggcaaaaacgaagacacttgaaaataattctccatattcccagacataaaatttcaacacatttattacatagggtgccactaaaccatattaaacatatactcctatttgtgcacacatgaacataccctgccctttggaaaaaagtatgtctatgaagtaaaaaaaaaaaattgatttaaacgtctcagtaataaaataaatgagaggtttgtaggtagaatgtgcctgggaattgactactgtaatcacttcaaggaactctggcacagcctacccgcctaaaaggtacaaatggagaggtgacagtgtcagtgttctacccagggttagaatccaaaatgatgctagacagcctcctctgcattgatgagtttttttccccagaaaaataactattttctgcttttcttgtttttcattctgatgcttttgtggttctttgctacccattctgtctaactgggcatcattagtggtgggtaggctgaaaccatactcaagtaacttgtttggattttccttgtttcacagtagttttcagcactacacatgaacagcctgttggaggcagccagcttaacactcaacttggctctctcagagccatctctctcatctgatgatggtcttagaattcctggtggctcggaatatacgtcttttagaggcagcaaaatgattctgacccttttgagccagtttcagtttcatggccataaacagccttgtgaacctctatgcctctgataaccagttattctgaaatagtcattaccatgtgctagtcttgattgttcataaggcttaatgtaccagaatttaaatcttgagcatcttgttttctctgtttatctgaggtcatttaaaaagttttatttcaatttctctctatgtaccataatgaaactgggaaaatccattttattttaattttttttagtatactaaggggttttctgttagtgagagaggcttgctctgtgttaaactcacagggaagaattatccttcccctggaatacagacccagggtgcagctagcagtgctctggcctttgcatgagagaataatatccatgtgtctcttcctgaccttttgctgacaagtttccctcattaaaaccactttcttctgtgtggctttgtgcagtttgccataacccattacctcaaaaatggtgcccaacatgaggtaaaatccgcttatttcacctctggctttttggaaactgcaaaagggatcaactaagctatactagggatggacagcatccctgctggggctggtgatgggaaacccagccaagctaacatctgcaaagcatgctagtgtggtgcttattggtgttcatgtgccacagaggtcctgggaagtttgtgtaagggagattgagacaattaaatcctttggcactccaagtctggcagcctctgtgagacctaaggaaaaagaagttgggagaaaaccctcagcacctaagtgccattagaatagttgatgcagtctaaacgtttttttgtttgttttggtttttttttttttttgagacagggtctctgtcacccaggctggagtgcagtggcatgatctcagctcactgtggcctccgcctcccaggttcaagcgattcctgtgcctcagcctccctagtagctgggactacaggcacctgtcaccatgcccaactaatttttgtatttttttgtagagatgcagtttcgccatgttggccaggctggtcttaaactcctaacctcaggtgatctgtctgccttggcctcccaaagtgctgggattacaggcctgagccactgcacacagccacaacttttagatttgagacttgtcattgtgcagtgtgccacccaggggcctttggtaggaattgaggtatatcctgtgggatttcaaagacactaacagggaattggactcccagcaatggtcacaagagtaacctgaggctttaattgtttatatgatgacgaggctacacctacaaagtagtgaagctgaatggcaagcactttgggtttatcacgggattctcttctgccagatgaatttgctaggctgaccaatggggagggagcaaatggacctgccttgttcttgaattggatgttcagggcaatcagattcacataaccaccaagaggagacttcctgagaaactgagtgccaagtgaaccattctactgaggttaaagctgttttgagacaacttggcatttttgcatacttgcatgaaaatcctaggcatctaggataagtagtaaccaaatgaccttaattcagagaatgctggaaaagttgatggtttcttatacggagacatccctaactttgctccttctgccagagtgtaaaggatgaaataatcctttggagctgatatatgccccacccaaagtgggggtaatgagataaggggccctggaaagaatatgtctcagcaaaaatgaaaagtcaagggaagagcatcaactctagacttttcctaggcttgcacaggcagtacatcatgactcttggtctgcaacaaagtgatgactagctaaggagatagataggaaaggtagaatcactctaaggagcttgcagagagaaggatgcaggaaacaacactgatattagagtaggcattaagaacccccctatggagagctgatgcaaggaggttctggatgggagggttccctttggagatggaggcagttagctttccccactgcttggccagcaaagctccaatgcctcctgcgtccttgtagaagggtttagaggaagctaagcagttggccacatcttaacactgctgaaacaagactctcagacactccctacccccagaggcctctgtgccacctgagagattgattttctaggccgattgctggggagctcttcaagtccatttaaaccaaaagcaagcttggcccagggccagttcctctgccctcttcaaggagatgctaacttcatgtcctaatccatgtagcctggaacatagataggggaaggacttaacagacctagacttaataaaacacaggagcccaagaagctgttattcttggacctgatcaagtccacagtaaatttccctggctggagttgggtttggttttacttagaaccaggagactcagcataattactgcagatgctgttggctgctttcataagaccatgctcactcaccatccctttgtcagactccacagttgatatggacatgctgagtcccctcagcccagcaaagcagaacatctgaatggatgcaaacatggcaatgtctcttagtgaatactataaatcagtcttattgagtttgcagaaccccctgcacttccaaagcctgtcggaattgtgcagttgaagctggcacataccaaagatgagaaagaaaacattcccctcatacaagatttactgccattgccaggagggaatggtaggctacactaccttccaattccacaaccctgttaggccagtgagcaaatccagtgtctttggccccagattacagatcattatggatcattgtgattttaacagtggccaccatggcactcacagtgcctgatacaccaacagatgactgaactgattgcagccattactggcaacgtggtatgtcctagagctacgctgtccagttcttaagccactaagccatatacggctgttgagtacttgaaatgtgctggtctgaattaagacgtgctgaatgtgtagaatacacgagattttgaagacttggtttgaaaagatgaatgaaaaatgtctcctttttatatttagctgttgaaatataaatattttaaatctcttgggttaactaaaatatgccatgaaaattcattatacctatctcttttttaccctttttaataatgaccactagataagttaaaattgcatatgtggctcacattatatttcaattggacagaattactctagatactactaatgttctccaaatttctccagaaacagaagaaatattttgctttcacctgacagaacattaatttctggtttgttgtgggaatttcacactcctccagcaaataagtgcaatttatcagtaatgggttgggcaagcccattccattatattgatgacattttggtagtgcccctcacagaggaaactgtcctcactgtaatgcatgctctctaatctaagcacaagtgtccacaggtggcctggcccttgaatgaggatagatgccagagccaggccacccaagtacatatcttgggggctgtattagcaacagcctgaggagacattccatagcataataaggaaagtctattggccttacagacactaccaaaaaaaaaaaaaaagaaaaagaaaaagcctatgatctgttcggcctctttgggtattagaggcagcacatctcacatttcaaaatgtcattcaagcatctgtacctagtcaccagactggtagccaaatttaagtggagacccctacagcaagaagcctcagaagcaatacaataaaatataacctgattcccatggagttttatgtatctatgacaggtcttacatctgatacacctggcaacaagactctgccaatactggggtgggaaatctctccactgctgaatggtacgtgccttttaaacgacaattatttgtccattataaatctctggcagggactgttgtctcactaaagggaagtgattgtcagatctaacatccccactctacaatgggttcactgaaccaaatttcataagattagtgtatcagtgagtgtatccaccagtgaggaaaacagaaatcacaccactaattttaacagagagtttgatgtacggattggttaaacagatattaaagggctgaaaatgcagaacaagaacattaaggtaatagaggtaggatctgcaggaagcatctaccatcctgaggcctggtggaatgaagggatgaagctagtatgatgagaacccaaagctcaaaggaggggcccatggaattaaaactccagacctttaggaaagggaaactgcttagttagtactggtatcttggaggcagaacctcatggggcttggacttagaccactgaggagagggtgccagccaactgactgatgctggtgtctgaggaggcatgacgatgctggctcagagagtgtggaaggaaaaatctggcaactggattcaagtgctgctactggaacaaactgtttctaccagagtgaagaactaacatcttcaagtctccttctagagccccttgttgtcagaacctaacaggaagcagctggtgaaggagaaatgtgatgtgcagagtctcagccccagcatcacagagcagattatagaaggatagtttggaactgagagacaataatttaataattggcagtgtgtgacaagccacagaaatgtgaaatggaaatagtacatccaattgagagtcaagcccactgcaaggataagtggttgcctatgcagtaggtacggagaaagtttcactcctgctttgcctgagcaactggctcaatgatggcatcaatttcaatggaaactaagccattggttataatgatgataagtgttgatgtcccatggcactggctgctctgcacaattaatagaagtacttcaagtggtgcttttgagcaataaaacattctgcttcttgaatgaaaatgtctttacacagacatgggctgcgctaccggccttgctcttaggtcaggatgttggaccacccaggatgagaccattaaagtcatacgtatgtgctgctccttatggaaagagatgcacctcatccacaggctcaattaataagtcacatatttatttgtctcttaaaaaaggccacatcctgagaaaagcaaaacatttggaatgagaaagtcaactgagcctctgagccatcctatttatggtgacctactagatccagatttagacccaccacagaaacaaaaccatcatgaagggctgtcatacagaagtcagaactaactcatactggcagatttactttataggtccccctgcccctatgtaggtccgtatagtgggtcctgactgctttagacacactctagatatggggttgcactccacctgccccagtcagatagcacacatagattaaagtgtgtgactgactttactacctttgtcatgtgttgacatgttctcacatgatacaatatgacaactcatttatggccagtgtcaaacaacaatgggccaatgagtctgtcagcatggaattcactggcactcctatgcttctttccactctcattcagcaggtgaaataaagtgctcgaatggccagcttaaggaacaatcacactggccactttaagaacaaattctgtaaggctgactagcacaattctcattagctgtatacactgccatgttccatgtgttagttcaggtcctctgagaagcagatgtcaagacagaattaaatgtgcaagatattttggggtgagagtccatgacagattaaaggggagggagccagagaacatcaagagagagtttagaccatgatacagatctgacattgatgaaggatagggaagaaagaaggactgagtaaggagatcctcaactatagtgcagtttcaagtacgtttcaaccaggttgatgaggagtgcttgatctgaagtcatctgttaaaaaaagttctacttgcaagaatggttctgtatttgcattagtacccccactgtgctcaattagtggctaattattggctgaaagtagcctgaaggaagcacaaccttggtgcatacacagtggtggatccagaagggtagcatctggggctgtcagtcaattatgctctccacaataggagattgaagtggtacactttggtggccaccacattatgtaataataatttccctcttttttgtttggttttagaaatgaggtctcactctgttgctcaggctggtcttgaactcctgagcttaagtgattctccaccttggcctcccaaagtgctagaattacaggcataagccaccacacccggccaaattccttttttggtcccacattaaccatgatgaatagctgggaggattgtactgcatggatcacagaaatgtggatgaacataaatttagaggctcttttcttttttcttttttcattgaaatggcatctggtgacctttcccctgccccccacatccccagacaactctgaatctggggttgccacatgcctcctttgcaatttgagaacactgctgtggttctcatgctcatatcattagtcacctctgtgctgtaaaaatcttcctggatctcaagaggttgtctttgataaagggattgttatccccatggtctctgcagagattttcattctaggaaataaaagaaagtctggttctttcctgagggtagctgacagaccctgactggttgggctcgggcgaattcaaccctgagaagcatgtagaggatcaaggggcaaaaaacctctctgttttcctattccagatagggacagactatacccatctgaggcagtgacctctagtgccaattatcacaaagctatatatgtcactcccaactggatttggctatgggggatcatattagcatcccactatcaaatgatgcctcaagtattgctcctataggcaaggggcctcagccaccattttcctgggccttctgcactcatgtgtctatcccctgtgatgtccataccaaacgaatgcagagtatcatcttggacccaactcaaagtagcatttgtgtacccctcgcccgctttcaggattagtttttctgtgcagttaagatagcttcctttgcctcccctgcctttcccttcaaagagtcgtccacttcctgagggtagtcatacaactcttcaaaaaacaaagaaccagtgggcacagactatatcctcagcttctggcaccatcagtaggctctccttgggagcattatggacacagtttattgttattttacatgggtttttctctcatcaggaggtgtttgtaaggctcactaggggagattaccgatgagacagctggggatctcactatcaaagatgttgactccctaactcagattgtgttagacaactgcataactttggattatttactaactacgcaatgtgcattgtggtcaacccgattctggatgaatacttcaatacaagtagagctatcactcagcaactggtggagttagccatatggctccaaaacactcccaatcaaagccttggatctttttctcatagtttggcctgggctccatgattagaggtctcagggaactctacagatttttattttaaactttgtacttttaggaccttccttattttacaaaatttccttggcatagtcacatactccagaaaccccactgaaaaatccaatttatgtttagtcccagtgggcaggcacatctcccagaagaacaggagcccatgtatttcgtcttactaacactttggcttgcacgttacccccaattaaacctattcttatgcccattctacataacacaatagtgtattcttccactcacctttcaaagacagactaaatgggcaaaactagaggcagaaagatcaggctgttgaaattatgagccaatgctaaggtagtgagaatggaaaagaatcatgggattcttatgacatttaggagatgggatcagtgagacttgctgattattatgtggggagaaaggggaagggaagaagctagggttatgatttacaatttcttttggagaaatagatttattcattcaactgatgtttattcactgtataccatgagtcaggcagcatgtttgatgatgaggatacagaagaaaaatacactgggagacaaaaattaacataaaataaaagaacaattacagagacaaatagatataatgtgcctcctcatatgatgcactgagaaggatacaacctcacttctgtagtgttcctgctaaaaaatgaataagctgaaattaatcatatgaaaacatcagacaagtccaaatagatgaacgttttacaaaataaactgcttgcactcttcataattattgaagtcataaaagacaaagaaatactgggaaagtatttcagaccaaaggatactaaaaagacatggtaattaaatgtaacatgatcctggattggactttgaaccagaaaatgttgtcttttgtcataaatgacattattggaatgattggctaaatatgaataaagtctgcagattacacaatgcgacaaagctgacttactaatttcaaagattgtactgtggttatgtaagagaatgttcttgtttttaggaaatacacactaaagtgtttagaaggaaaaggctgagctattggctgaaagaaggcgtaagcagtagcagagcaacaaagcatgcttaggctctggagttaaactacctgggttctaaccccagcacagcaatttgctacctatgaaactttgggcaagttatttaagcattctacaaatgaaattttctcatgagtaaaacggacgatgcttataatagcccctactccatagaggtgatatgagggtgaaattagtgagcatatgtgaagcacttaggctcatgcctggcatgtatgtgtcatcaatgctggctgtacttaagctatatttcactctgtgtcctgtgaatacagaaggaaatgtgacacagcctccttcttcaaggagacacagtgtagtaggaaaaataacaaggttaacagataataataaaaccatgtgatgagtaccctgatctggacttgagctgagagcagctgagctagagcagtaaattctgtggggggatgtcaggaggggtttcacggagggcttaggatttaaattggatcgagagatgtgaacagaagtttgcccaaaatatgcatctctcacttctgccaggccaagggcatcatacaaaactctgtataagcacagagttccagaaggttattgcgtactatagtgtatgcataggatatgcagtaatgtagcataggatatgtaatagaagggccagactcaccttccaggtgtgtggagagcattgactgccagtctgttgacacaggttcagatcccagcttaaatatcaatggttgctttgagcaactcatgaaacctctctgaacctgtttcctttccaaaatggagatactagtgtttacctcagagttcctgtgaggattaatgtaaagtgcttagcacaatgctcagtacatggcctgtgttcaataacggatagcaattagtaataatactggtattagacatttctagggctccccaaatttcctggttctccttttcttccaggtacatgcttccctgaacagggcctgagtgaacatggccctgtaccttcctttggataacaaagtggaagtggaaaggatacatgtcctttctgactggagccattgaagaggcagtatggtttgattctctacatactcttcccctgatacaacaatttggaagttcaagttgggatggcagcatcataagatggtgatatctctgtcagcaaaggtcttggggatgatcagcagtgtccctgccaacctgtgttgggcatgtatcatgcgcaagcaacaaacctttgctgctttaaggcactgagattttagagtttcatcagctttagccacacttggaaaccccgaagaatcagggactattctaaacacgttgatgtcccatgccaatctccagataagggaaaatgggcactcttcacctctcccaccttgtcgatgggatgacaaaattgggtgcaaggtttggcaacaacttagcttaacagaggaatcccaactcagtataaacaaagaaaaaccaccaggcagatgtatggccacttaaagacatacggactcagaaaagctcccaaacagttcatagaggaggcagtaaatattgagcatatctttctctcttcatttaaactaactgaattattttttcatattcaagcactataggattaatgatattgtaaccaaaccttattggaaagtataagatggggattgaacctggtcggaggatgatatttaagttgaggcctgaaggaggaagaggagctagctatgtgaaaagaagaaagcatgtacaaaggcaggagacagcatcaggagtctggggaagtttggtatggtcataacatatgaatgagggagagggggcaagagctgaggctagggtggtaagcaaggtacagagaaggtgagtgctcataaaccagggaaaggaatttggattgttggggcaatcaccagccgttgatggatattaagcaagagagtgacataatcaggtttacaattttacaagcacacaagagttacagtgtggtgaatggattggaatgagcaagaccacaggaggagagagtgcagagccctgaattaattagagacatagtgtatcaagtgtatcagtcagggttccctacagaaacaaacccagtacttgtgtgtgtgtgtgtgtgtgtatatagatatagatatatatatatatatatacacacatacacatatatatatacactatatgatatataatatatcatatataaagcatataatatataaagtatatcatatataaaatatatattatatacatattagattagagatgtatttaaggaatcagcttatgcgattgtgggagctggcaagttcaaaattcatagggtaagctggcatgctggaaacttagataggagttgttgctggagtcttcaggcagaatttctttttcttcaaggagacccaagattttcaactaattggataaggtcaacccaaattatcaacagtaatatccttaaattgaagtcaatttaaaccagacccattcattaaaccatatacaaaaattgacacaagatggattaaagacttaatgtaaaaccccaaactgtaaacaccctggatgacaatgtaggaaataccattctggacataggaactggcaaaaatctcatgaccaagatgccaaaagcaatcacaacaaaagcaaaaattgacaaatgggatctaattaaaataaagaccttctgcagagcaaaagaaactatccacagaataaacagacaatcaacagaatgggaaaatttttttgcaaaccacgtatctcacaaaagtctaatgtccagcatctatagtttacttatataacaaacctgcacatgtaccccaaactgaaaagttaaaaagagtcagttgaggccgggtgcggtggctcacgcctgtaatcccagcactttgggaggccgaggcgggtggatcatgaggtcaggagatcgagaccatcctggctaacaaggtgaaaccccgtctctactaaaaaaaaaaaaaatacaaaaaattagccgggcgcggtggcgggcgcctgtagtcccagctactcgggaggctgaggcaggagaatggcgtgaacccgggaagcggagcttgcagtgagccgagattgcgccactgcagtccgcagtccggcctgggcgacagagcgagactccgtctcaaaaaaaaaaaaaaaaaaaaaagagtcagttgatggtagatttaacttcatctacaaaataccttcaagtaacacctagtctaatgtttgaataacttggcactatagcccagccaaggtgacatataaaactaaccattgcaggtagtttaggaggtagaatagagaggttttgctgattgaatgaatggagattgaggaatgtggaagaatcaaaggtaactccgatttttgacttgagcaactggataaaagataacactgccgattaggttagagaaaggtgaagaaagtgcaggttagtggtggataaccattcaattttggatatgagtagttttaagtgttttcaagttatccaagcaaagatacttaagtgggggtcagaagagagataaatgtaagatgtagttttgtaagtcatcaggatatcatggcaagttagcagtgggagtgcatgggatcacttggcaagatagtgtacagtgaggaaggaaagagaagaagacctaaaagaaagccctgagtaaacccaacacttagatgccaagtagaagaggaatattcattaaagcaaatgaaaaacgcagccagatatgtaagaaagccaggagacaaacaactgaaaacaccaaagagagagcgactgcttcttggagggagcagatttattgccatcatttttcttgtagacttcagggagccagcaaaggcattcaagtaggaagaatcatttaactgcaatgagcagggtagtattcgaactatgagaccctattggttgggaggttatttagggaccattttctagccaagggaagaaataataagggtctgatccaggactgttgatataggaatagaaaggaggaatgggcttgagaagtattttgaagcaaaatcaacagacgtctaattggatatgagcaataaaaagtccaaaatgacccagaagtcttaagtggaagagaccagatgaagggtaggaagtcagaaggagatattagcttgagaggaaaatatttgaaggtcaagtttggacatactttaggcatggcaaaatatttatctgtgtttcccagatgtaccatatctatcataccctttcatttttctaagtctgtcttcagcctcctccatgaaaaacacctttcccttcttgttcgcctggacattatctactcaatcttcaaagcccaaattaaatgtcacttctcagtagttttcactgacgattccaggctgaattaattgcatcctccatagtgttcctgcatcactgtgttcaaaactttgtttttaagagcattcatcacattggactacaattgtattttacatacctgtttcccacactagactggaggtcctagagccaagggcctctgacttagtccgtctggttcttctagaagtaagaacattgagcttgcttagttgatctccatcttggagctcaggaaaggggcaaggctagatatatgaatattatagtgtcactgatatagaggcgatctctaaacaaatggaaataaatatatcacgcctggttgtggagtgactaaagaatacaaatattagatggcagcaggaccaaatgtcagggaacgcttacatttatccaacaggatgaggatcaggagaatgtgagaattgagctttgtctgtcaattaaaatatatttattggggaaatactatgacctatttaatatttaggcactgaaaacacagcaacaaatgaggcagactagttctcttctcttgtagaacttacagaccagaaaggacacatagattccctgagaaaaagagggaagttagttgtttcaaatgctgcaaagtgtttgagaaggataaatactttagtggctttcaaatttgaaaagtggaagccaaaataaccatgtagccaatttcattctaagaataaaggccaagggtgttgtgaaggaaaggaagttgcagattcaggtgcaaaagtatagaagtaagaaatatagactttttaaaatttagtaggcccttgagatgcaaaaattggagcaggtggtataatcagataatgtgggctccaagagagaggaaattgaccacaagcattgaaaccatggtttggggtagcaaagaggtctaagaaatttactgacctcttcttttcccctggaagtagaaggagaagcagtatccattgaagggagtttccagcacagtggttaacccagggaggattaatcagttggaagctaattcaaggggtaggaaagcagaggaaaagaaaaaaatgtgaagatttagagcagcttctttatattaggatggagattttaaagggcacagtggaagaagctgatagagtgtgtaagaggtggagtgtgcttgagtggtagtagttcagggcatgaactgggtgcatgtgaggctattaaagatggtagtggcttgcccaacatccacccaaacctcttcaggtatgtcttcctataccgcagaagctagaaagctaaaaagccacattttccagattcctatgcagacaggattttggatgtgattttggtacagccaatcagttgtaattacatcatgtgtgatttccaaactgagccaaatgggaaggaagtggcatgcaagacattcattttgctggtgagggtcgggagccaatagttctggcagcaggttcctaatccccagatctcagcaaactacggttttcctagaaccaactgttccagaaatgacttactgatccccaggcaaagtacatgaacagatacttcccaaaagaaggcatataagtggccaagaaacatatgaaaaactgctcaacatcactaatcatcagagaaatgcaagtcaaacccactgtgagataccatgtcacaccagtcagaactgctctaatttaaaatgtcaaaaattaacagatgctggcggggctgtggagaaaagggaatacttatacactgttggtgggcatgtaaagtagttcagccactgtggaaagtagtttggagatttctcagagaactaaaagtaaaactaccattagacccagcaatcccattactgggtatataaccaaaggaatataaataattctaccaaaaacacacatgtactcatatgttcatcacagcactattcgcaatagcaaagacatgcaatcaatctaggcgcccatcaatattggattggataaagaaaatcatggaatactatgcagccacaaaaaggaatgaattcatgtcctttgcagcaacatggatgccactgaaggccattatcctaggcaaattaacacaggaacagaaaaccaaatactgcatgttctcagttataagtgggagctaaacattgggtacacatggacataaagatgtgaacaataaacactggggactactggcggtgggtagagggaaaggggaaagggctgaaaaactacctattggatactatactgactacatgggtgactggatctctcgtaaccctaatctcagcatcatgcaatatacccatgtaacaaatctgcacttgtatcccctgaatctaaattaaaagttaaaattataacaaaaaaataataaaaataaagatatttgatttaaaaatatataatctggtaaagaaactgaaatgacacaaaagaatggaaagatatgctatgcttatgaatcacaatattattaaaattacagtaccctcccaaagcaacttacagattcaatgcaatccttatcaaaataccaatgatattctccatagaaataggaaaaaaattcctaaaaattatgtggaaacacaaaagactcaaatagctaaagcaatcctgagtaaaaagaacaaagctgaaggcattacattattggacttcaaaatttactacaaagttataataaccaagacagcatggtactagcataaaaacagacacatagaccaatggagcataatagagaacccagatatagaggggaatccaccattgctgaggcttgagtaggtaaacaaagctcaggaagctcgaactgggtggagcccaccgcagctcaacgaggcccacctgcctctgtagactccacctctgggggcagggcatagctgaacaaaaggcagcagaaacctctgcagacttaaacgtccctgtctgacagctctgaagagagtagtggttctcccagcacggtgtttgagctctgagaacggacagactgcccctcaagtgggtacctgacccctgtatagcctaactgggagacacctcccagtaggggccgactgacatctcatacagctgggtacccctctgagacaaagcttccagaggaaggatcaggcagcaatatttgctgttctgcaatatttgctgttctgcagcctccactggtgatacccaggcaaacaggtctggagtggacctccagcaaactccaacagacctgcagctgagggacctgactgttagaaggaaaactaacaaacagaaaggaatagcatcaacatcaacaaaaaggacatccacaccaaaaccccatctgtaggtcaccattataaaagaccaaaggtagataaaaccacaaagatggggagaaaccagagcagaaaagatgaaaattccaaaaaccagagtgccccttctcctccaaaggatcacagctcctcaccagcaatggaacaaagcaggacggagaatgactttgacgagttgacagaagcaggcttcagaaagttggtaataacaaacttctccaagctaaaggaggatgttcgaacccatcacaaggaagctaaaaactttgaaaaaagattagacaaatggctaactagaataaacagtgtagagaagaccttaaatgacccgatggagcggaaaaccatggcatgagaactacgtgacgcatgcacaagcttcagtaaccgatttgatcaagtggaagaaagggtatcagtgtctgaagatcaaatgaatgaaatgaagcaagaagagaagtttagagaaaaaagagtaaaaagaaacaaacaaagcctccaagatatatgggactatgtgaaaagaccaaatctacatttgattgatgtacctgaaagtgatggggagaacggaaccaagttggaaaacactcttcaggatattatccaggagaacttccccaacctagcaaggcaggccaacaatcaaattcaggaaacacagagaacaccacaaagatactcctcgagaagagcaaccccaagacacataattgtcagattcaccaaaactgaaatgaaggaaaaaatgctaagggcagccagagagaaaggtcaggttagccacaaaagggagcccatcagactaacagcggatgtctcagcagaaaccctacaagccagaagagagtgggggccaatattcaatattcataaagaaaagaattttcaacccagatttcatatccagccaaattaacttcataagtgaaggagaaataaaatcctttacagacaagcaaatgctgagagattttgtcaccaccaggcctgccttacaagagctcctgaaggaagcactaaacatggaaaggaacaatcagtaccagccactgcaaaaacctgccaaattgtaaagaccatcgatgctaggtagaaacagcatcaattaacgggcaaaataaccagctaacatcataatgacaggttcaaattcacacataacaatattaaccttaaaagtaaatgggttaaatgccccaattaaaagacacagactggcaaattggataaagagtcaagacccatcagtgtgctgtattcaggagacccatctcacgtgcagagacacacataggctcaaaataaagggatggaggaatatctaccaaacaaatggaaagaaaaaaaaaaagcaggggttgcaatcctagtctctgataaaacagactttaaaccaacaatgaacaaaagagaccaagaagcccgttacataatggtaagggatcaattcaacaagaagagctaactatcctaaatatatatgcacccaataaaggagcacccagattcataaagcaagtccttagagacctacaaagagacttagactcccacacaataataatgggagactttaacaccccactgtcaacattagacagatcaacgagacagaaagttaacaaggatatccaggacttgaactcggctctgcaccaagcggacctaatagacatctacagaactctccaccccaaatcaacagaatatacgttcttctcagcaccacatcacacttattccaaaattgactacatagttggaagtaaagcactcctcagcacatgtaaaagaacagaaatcataacaaactgtctctcagaccacagtgcaatcaaattagaactcaggattaagaaattcactcaaaaccgtacaactacatggaaactgaacaacctgctcccgagtgaatactgggtaaataacgaaatgaagacagaaatatgttctttgaaaccaatgagaacaaagacacaacttaccagaatctctgggacacatttaaagtagtgtgtagagggaaatttacagcactaaatgcccacaggagaaagcaggaaatatctaaaatcgacaccctaacatcacaattaaaataactagagaagcaagagcaaacaaattcaaaagctagcagaaggaaagaaataaccaggatcagagcagaactgaaggagatagagacacaaaaaaccctttaaaaaatcaatccacgagctgtttttttgaaaagatcaacaaaattgatagaccgctagcaaggctaataaagaagaaaagagagaagaatcaaatagatgcaataaaaaatgataaaggggatatcaccaccaatcccacagaaatacaaactaccatcagagaatactataaacacctctacgcaaataaactagaaaatctagaagaaatggataaattcctggacacatacaccgccccccccaagactaaaccaggaagaagttgaattgttgaatagaccaataacaggctctgaaattgaggcaataattaatagcctaccaaccaaaaaagtccaggatcagatggtttcacagcagaattctaccagaggtacaaagaggagcttgtaccattccttctgaaacttccaatcaatagaaaaagagggaatcctccctaactcattttatgaggccagcatcatcctgataccaaagcctggcagagacacaacagaaaaaagaagaattttagaccaatatccctgatgaacatcgatgcaaaaatcctcaataaaatactggcaaaccgaatccagcagcacatcaaaaagcttatccaccatgatcaagttggcttcatccctgggatgcaaggctggttcaacacactaaaatcaataaacgtaatccatcacataaggagaaccaaagacaaaaaccacgtgattatctcaatagatgcagaaaaggccttcgataaaattcaacagcccttcatgctaaaaattcttaataaactagctattgatggaacgtatctcaaaataataagagtatttatgacaaactctcagccagtatcatactgaatgggcaaaaactggaagcattccctttgaaaactggcacaagacagggatgccctctctcaccactcctattcaacatagtgttggaagttctggccagggcaatcaggcaggagaaggaaataaagggtatttaattaggaaaagaggaagtcaaattgtccctgtttgcagatgacatgattatatatttagaaaaccccatcatctcagcccaaaatctccttaaactgataagcaacttcagcaagctctcagggtacaaagtctatgtgcaaaaatcacaagcattcttatacaccaataacagacaaacagagagccaaatcatgagtgaactcgcattcacaattgctacaaagagaataaaatacctaggaatccaacttacaagggacgtgaaggacctcttcaaggagaactacaaaccactggtcaatgaaatgaaagaggaggcaaatggaagaacattccatgctcatggaaaggaggaatcagtatagtgaaaatggccatactgcccaaggtaatttatagattcaatgccatccccatcaagctaccaatgactttcttcacagaattggaaaaaaactactttaaagttcatatggaaccaaaaaacagcccgcattgccaagacaatcctaagcccaaaaggacaaagctggaggcatcacgcttcctgacttcaaactatactataaggctacagcaacccaaacagcatggtactggtacccaatcagagatatagactgatgggacagaacagaggcctcagaaataacacccacatctacaaccatctgatctttgatgaacctgacaaaaataagcaatgaggaaaggattccctacttaataaatgctgctgggaaaactggctagccatatgtaggaagctgaaactggaccccttccttacaccttatacaaaattaattcaagatgtattgaagacttcaatgttagacctaaaaccataaaaaccctagaagaaaacttaggcaataccattcaggacataacgcatgggcaaggacttcatgactaaaacaccaaaagcaatggcaacaaaagccaaaatagacaaatgggatctaattaaactaaagagcttctgcccagcaaaagaaactaccatcagagtgaacaggcaacctacagaatgggagaaaatttttgcaatctacccatctgacaaagggctaatatccagaatctacaaagaatttaaacaaatttacaagaaaaaatcaaacaaccccatcaaaaagtgggcaaaggatatgaacagacacttttcaaaagaagacatttatgcagccgacagacacaagaaaaaatgctcatcatcactgctcatcagaaaaatgcaaatcaaaaccacaatgagataccatctcacaccagttagaatggtgatcattaaaaagtcaggaaacaacaggagctggagaggatgtggagaaacaggaacgcttttacactgttggtgggagtgtaaactagttcaaccattgtggaagacagtgtggtgattcctcaaggatctagaactagaaacaccatttgaccccccgatcccattactgggtatatacccaaaggattataaatcatgctactataaagacacatgcacacatatgtttattgcagcactattcacaatagcaaagacttggaaccaacccaaatgtccatcagtgatagactggataaagaaaatgtggaacatatacaccatggaatactatgcagccataaaaaaaggatgagttcatgtcctttgcagggacatggatgaagctggaaaccatcattcagaacaaactatcacaaggacagaaaaccaaacaccacatgttctcactcataggtgggatctgaacaatgaaaacacttggacacagcgtggggaacatcatacactggggcctgtcatggagtgggcggttgggtgagggatagcattaggagaaatacctaatgtaaatgacgagttaatgggtacagcaaaccaacacagcacatatatacatatgtaacaaacgtgcacattgtgcatatgtaccctagaacttaaagtacaataaaaaaaaatagagaacccagatataaatccattcatttatagcccactcatcttcaacaaaagcatgaagaacatccagtggggaaaggacagtcttttcaataagtggtgctgtacaggctggataactatatgcagaagaatgaatctatacccctatctctcaccctacacaaaaataaaatcaaagtggataaaagacttgaatctaagacctcgaacgatgaaactactagaaggaaacactggggaaatgtcccatgacattggtgtgggcaaatatttttttgtgtaagacctcaaaagcacaggcaacaaagtaaatgtagataaatcggatcacatctgattaaaaagcttctgcacagtaaagaaaacctatcaacaaattgaagagacaatccacagatggaagaaaatatgtgcaaactatccatctaacaagggattgaaaaccagaatacataaggagttcaaaatactcaatagcaaaaaagacccataatctgatttaaaaatgggcaaaagagccgggcgcgctggctcatgcctgtaatcccagcactttgggaggccgaggcgggcggatcacctgaggtcgggagttcgagaccagactgaccaacattgagaaaccccgtctctactaaaaatacaaaattagcaagggtggtggcacatgcctataatcccagctatttgggaggctgaggcaggagaatcgtttgaacctgggaggcagaggttgcggtgtgccaagattgtgccattgcactccagccagggaaacaagagtgaaactccgtctcaaaaaaaaaaaaaaaaaaaggcaaaagatctatatagacatttctcaaaataatacatacaaatggtcaacaggtatatgaaaaaaaggttcgacattaccaatgattagagaaatgcaaatcgttagagaaatgcaaatcaaaaccacagtgagatatcgtctcaccacatttaaaatggcctgtgtcaaaaagacaggccctagcagatgttgatgaggatgagaagaaaggtgaatcctcacacactgttggtaggaatgtaaattagtatagccactaacagtatggaggttcctcaaaaaaactaaacatagaataccatgtgatccagccattctactacttggtatgtatccaacaataaaaaggaaatcaatatattgaaaggatacctgcactcccatgtttattgcagcagtattcacaatagccaaaatatggaatcaacctaatttcccaacaaaggatgaatggataaagaaaatgtggcatatatacaggaaggaatattattcagccctaaaataggatgaaatctggtcatttgcagcaacatgagtggaattggaagtcattatgttaagtgaaataaaccaagtaaaaagcgacacatatcacatgttcttactcgtggaaattatataagtgaatctcatggaggtagactagaacaatggttaccagaagtcaggaaggttgaggggagagggagatgaaaggaaaaaaaaaagaatataaatatatttattaccactaaactgtacacttaaagatgtaaaggtgacaaattttgtatgtatattttacctcagcaaaaaggcataagagtaaacaaagaagcaaacaatattaagtcttaagaaagcaactggttaatatttaattatattataatttttaacaaaaaggagaacaaacatctgcatattgttctattgcgctaatgaataatagcaatggaattacagtataataacatttgcactatacctcacagttgtcacacagtttcaccataaattttaaacacaaataaaaacttcaagtggtatcatagaatgacagaactgaagaaactgaggtttttttgtcttcatatttacaataactgtgctattgttcaaacagaggaatgttgagcatcacaagtgttagaaacatgaagtaactgtacctgaaggaagcttgaatggattttaaactgtgatgaactttttctcaaaacagaaatgtatagttaggtccaggaagcctggggattgcgtgtataactggaggttttccaaattaacttccatttagaatacaatgttgatgaaaagagatgtaatttaaatgtgctgatttgaagtatgcttatctattattgcaactcaacagtagtctcagcaatttgtttagaatatagctcaacaaatgattttgttttcagagaagagcgtgttcccactgacatgatttagaattgttgacatggtgataataacaaagcagaccaaattataattggttttcttcttcttccttctctagaggcagtgcacttcctcattgcctgcaaccaaggaaatgctcccattgccctggccttgatatgtcactggtttcctactgtgttgttctagaaattttttcctggaagcccagataagcctcctcctccagtccttcctataattctgtaatcaacaaattccctatatgaaaatccctctttgcttaaactatctagttatgtattctaactattctagttatctgcaactaaaccctgactgatacagatagtaggcaaggaacaggggattttgcttagagcaatagctgttaaaaacattcattcctttatccatccattcactcaacaaatacttacatggatctctctgaatatatatagctatgcctatgtgttattcaaatttggggtattttctcctgagagcatttaattttgactaggcgatcaagtcatgcacaagagagatggattggacaactatattagttagaaagcgtttggctgtcagaaacagaaacactaactcaaaatggttaaaactattaggaaatatattatcttacaaactggaagttccacaatgggtcaagttttggggtagctcaatgatatcattaggtattcaggttcttcctgtccctctcttctgccatactccatattgacttcatccttatacctgcagcaagatggcttcagctcaaccagaaacaacaatgatcagagaaagagaacagaatgattctctcttaggagtaagtagattgctgtgtcattacggccccactcacaggtgatctgtaggacaacggggaagggaacctgttgggcagaactttgagtcatgtatttggttgtccccttcgtctggaacttgtcttatttgccaggaagaagaaaaaggctgtagcaaggatctatgctgaatcatggcagagactaatgttgcggctggatggtcagggtcttggaagaagcaagtttggagtattgcaagtttggagcaagtttggagcaaggaaatttgagaaagaagtatgtgaattgatctagaatgtatgtcttgcatatgaatatttatcaaaaggttctctttgtaggagagctgctaaatagtcagatgggcttaatgcccattcagtggatatcaatcagactctctctaccactccggtgcttgatggatgagctcatatacaaagtggccttggggacagagatgaaaatatgcatggactcaataatatgaatttcttctcaccaaaacatactacttcttggatgcccaatttaccagcagcagccattagccctgggtccctgatatggtataatatcctatgggtaccaacgagccatcttgggacagtttgattggtttggaccccttttattatagactggacagtgacttgtttcttaacttgaatagattgtaactccaaattggatttgttttcctgtttaccatacctcggctagccctaccatctgtagatttattgaataccttacacagcactattgtatctcacacaacattgcttctatcaaaggaactcacattaccctgatctaagtacagcaatgaaatgaagcctgttggcttcactggttttaccacatgccaactcacctagaagaaatcagcctaataaaacaatgaagtcacctcttataggtctacttatgacatggcctagcaaaaaacaccctgtcagtttggggtaccatcttgcaggaatgtgctgtacatgctgaacaaggactagtgatcaacatatggtgttgtttcctccataaccagaacacatggggctgagaaccaagggatgatggcaagattgacatctcatgatccacctacaaaaaattgggtgtttggcttcctattctcacaactttggtttctgctattttagaattagaagcttattattattcaatatttctttcagggaacacaacaatgattcccctcaattagaagctgggactgccacctcatgctggtaggcaaaccagaaaaaaaaaaaagataattactacctgggctaaggcaactgatcctgattatcattaaatgttatacattataggaatgaactagtttgcttttattactctactgagacatcatttatgttatttccactataacaatgaacattgttgtacatgtccccttgtacacatgggtgaaagggtagatacctgaaagtggaattcctaggtcacagaatatgtgaatatttaactttacaatgtgttgtcaaaaactcaccaaagtgggccaggcgcagtggctcatgcctgtaatcccagcacttcgggaggccgagacgggcagattacctgaggtcaggagttcgagatcagtctggccaacatatagtgaaaccccttctctactaaaaaatacaaagttagcctggcgtagtggcacacacctgtagtcccagttacttgggatgctgaggcaggagaattgcttgtacccgggaggcggagctttcagtgagctgagatcgtgcactgcactccagcctgggcaacagagcgagactctgtctctcaaaaaaaaaaaatcaccaaagtggttgtacccatttgtaaccccacctacaatgaccaaagtcctatttgtatatattcgtgtggatatttatttagttttgctaatctgatcagtgtgaaaaatctcattattgatttaacttatattcccatgattacttgagctcaggcatcttttcatgtctgtggtgatatttgaaaaaaaaatagtgtcaattatgttttccacaagaacagtagttacattctgagcagtggtatgcaccatctcatgaaacaattcttgtattcatgcccatgcaacacatttttatctctaattaggtctgggttgtttagtatcaaatttagctcccttgagggtataggacaaaagaggaaagccagtgcaggattttaaatttacatctgataatctgtaaaatggacacttcatatggcttgtgtgtgtgtgtgtggggggggggcctcaatctctaattagtgttgtgtaaaccaggaagtgctgagatgtaatcttagggattttgtcccttgagttcctgttagtaatttgggtttctaatggtataacgtggattgcattgtagtagaactgccatgcctcacgggtttgcagcaacctcaaatgctacagtcaagtatgagtcatagcatgccagagctggatggtatcttcacaatcgggctatccacagcccataattggtgaaggggggaaactaaggcgaatagagctcaacctgtgaggtggcaaagagctgagttcccaattgcgtgctccagcttgatctgagacctcagggtggctgtgcggtgtctggtcatatgataattttccacctgtgctatgacatgaacaaggctgctgttgggagacaattttccatggatttgttgagtttctgtatgtctcaggagagcttttgtcctttgtctctgactcagtagtcttgcatcttctgccagcatctataaaactgcaactagttaccttgttacttgaaagaagagtaaaatctcagatacttcacagctcctcacagttgaaagcagtagtttcagaagctattaataaatgttttgtgtgataagaatcctctcatcaaattcgttttggaaaagctgaagccaaaaaaagaatttaaaaaaatatagaaggaaagtgggttcttttcctgttagactctttgataaactaaacagcattataaatggctcttgggcatggggcagggatgggtggagtgtgctacgtttcaagaattattggaataggaagccttgcttctcccttcctctgtgggatgcttaggaacactggaaataagaatagaataaaagtagtagaaacggaaagtacgtataatataattatgaataaggatggaaatgcagttggggtggttttcatatcctttgtaaactagaatgtggtaagctaacagttatggaagcagtacctacacagtccttttgctggtgtgcccaaaccaaggaagataatgggattttgcccaagggtcagattttagagccaaaagggggtctagaaacaatgtccaacccttccattttacacatgaggcaccaaggcctagtgggaggaaggcatttacttagagccacccagttcatgggtggtaattttagcagtaaaacgtaaatgattttagtcacttttcagtgttcgtcacacattatttgttctcatgttatcgtattgttttatttatttgtaactcagttttaaggtttcataaggcaaatagcattttgtctaacacgtaaagcttctactaaagtgtaacaatctattgaatatctacgatattcactagtcactcttcaaatccaatactgcccaaaacgactttttgccatgatgaaaatgctccagccagacacggtgactcacacctgtaatcccagcactttgggaggccgaggtgggcacatcaccagaggtcaggggttcgagaccagcctggccaacatggtgaaaccttatctctactaaaaatacaaaaactggccaggcgtggtggtgtgcgcctgtaatcccagctattccagaagctgaggcaggagaatggcgtgaacctgggaggcggagcttgcagtgagccgagatcgcgccactgcactccagcctgggagacagcaagacaccgtctcaaaaaaaaaaaaaaaaaaaaaaaaaagaaacaaagaaaaaaaaaatccatattgccagtgtccaggatggcagccataagccacatgcgactattgagcacttgttaatgtggctactgtgattgaggaactgttttcttaatttcatttaattttaagtaattgaaatttgcatttaaatagccacatttggctagcagctgctgtcgtgagtgctgtaatgacgaactgtagtgaccatacactacagtgtgcactctgggaatgaggaggaattaacggctaaggttggagtcagaatccgagttattcctttttgttgatctatggcaagcagtcatgccactggtgcaggcctgaagccccgttcacttgttccacaagcatttagcaagcacctatatgccaggctttgagtgggagtgtgggggtgcaccaaccactggccacgtggttataagggtctgggcctgtggaatgaagcagaagacgtcatcgtgaaggaatcagtttcaggtctcgcgagagttggcacatgccacgcgagggccactgccctattggcttctgagtcacggactgccccggaagcttctgggccacggactgccccggaagcttctgggccacggactgccccggaagcttctgggccacggactgccccggaagcttctgggccacggactgccggaccgttgggctgtgaggcagcgtctcagcgaggcggcacccggagccatgtcttcacataggaggaaagcgaaggggaggaataggagaagtcaccgtgccatgcgtgtggctcacttagagctggcaacttatgagttggcggcaactgagtcgaatcccgagagcagccatcctggatacgaggccgccatggctgacaggcctcagccaggatggcgggaatctctaaagatgcgggtcagcaaaccctttgggatgctcatgctctccatttggatcctgctgttcgtgtgctactacctgtcctactacctgtgctccggtgagtgctggctcaggccaggcagggaaatgctgggggagggggagggggagggagaggggggcggggtgtggcaacacaccggcaccaaccataggccttcctgccccttcctgtcctctctcctcccaaaggcctttatggccctatcctcagcagtccttacaaagtcctgccctctctcgcctggccgcaggaagtctttcctgcctaaactcacttataaaagactttccctccccaacttcccctaacaaaagccttcccttcctcacttcccgccacaaaatagactaacctcccttgtcgcccctttttaaaaattgaggacaaggcacggtggctcacatctgtaatcccagcactttaggaggctgaagcaggtggatcacttgaggtcaggagtccaaaccagcctggccaacatggtgaaaccctcatccctactaaaaatacaaaaattagccgggcatggtggtgcacgcctgtaatcccagttaatcgggaggctgaggcaggagaatcgcttgaattcgggaggtggaggttgcagtgagctggcatggtgccactgcactccagcctggtgagagagcgagactccgtctaaaaagaaaaaaaaaaaaggactgggcgcagtgctcacgcctgtaatcccaatactttgggaggccgaggcgggcggattgcctgagcttaggagttcaagactagcctgggcaacaaggtgaaaccccgtctctactaaaatacaaaaaaattagctgggcgtggtggcattcacctgtagtcccagctacttgggaggctgaggcaggagaattgcttgaacccgggaggcggaggttgcagtgagctgagatcgcaccactgcactccagcctgggcgacagagcgagactccgtctcaaaaaaaaaaaaaaaaaaaaaaaggccgggcgcggtgggtcatgcctgtaatcccagcactttgggaggcggaggcgggtggatcacgaggtcaggagatcgagaccatcctggttaacacggtgaaaccccgtctgtactaaaaatacaaaaaaattagccaggtgtggtggcaggcgcctgtattcccagctacttgggaggctgaggccggagaacggcatggacccggaaggcggagcttgcagtgagccaagatcgcgccactacactccagcttgggcgacagagcgaggctccatctcaaaaaaatgaaaaaaaaattgaagtgaaattcatataacataaattaactattttatagtgaacaattaaagggatttcgttcctgtaaatgttgtgcaaccatcaccccatgtagttccaaaatattttaaccaccccaaattaaaacccatacccatgaaccagttactcccaattccccagtccataagggtacttaattcctttttatggctaactagtattccattgtagggatatactatatttttatctagtttttgaaatttaccgaatttgggttgtttccactttgggcctattatgaacaatactgctatgagcatttgtgtacaagttgttgtgtagacatgttttgaattctctaggagtagaattgctgggtcatatgggaactccattgatctttttgaggaagtcccacactgttttacaaagtggttgaaccgttttacatctccactaacaatgtttgaaggtttcaatttcaccaatatatgttatctgtcccccttgttatacattatagccattatagtaggagtgaaatagtatctctttatggttttgatttatattttcctaatgcctaatgacgttgagcatgttttatatgcttgttggccattcgtacatctttggagaaatgtcttttcaattatttgaccatttttaattggatcgtttgtggttttgctgttgagctttaagaattctttatatattctggatactggatccttatcagatacctgatttgcaaatgtttcctcccattctgtgggtagtcttttcactttcttgataatgtcctttgatgtaaaaatgtttttaattttgagaaagttcaatttatctattttgtctttggttgcttgtgttttggagtcatatctaagaatccgttgccagatccaaggtcatgacgattactcccatgtttgcttctaagagttttacggttttaactctcatattcagattgttgatccatttggagttgattttggcatatggtgtatgttaagggtccaacttcattctttggcgtgtggatagcccctcgttccagcaccacttgttgaagagacgattttttcctcttggcagccttctgaaaaatcagttgattatagatttataggtttagttctggactctgaattttattctggtctacgtgtctatctctatgctggtaccacattctttggattactgcagctttatagcaagtttagaaattggaatgtgtgagtccatcattttcgttcttctttatccatactgttttgcgtattcatggccactaacgactctatataaatttgagagtcagcttttccgtttctgccccaagcccattggaatgttgatagagttggcattgaatctgtagatcactttggaagtgctgccatcttaacaatattagggattccaatctgtgaccaccccatgtctttccatttattaatgtcttctttaatttatttcagtaatgttttgtagttttcagtttacaggtctttaacttccttgggtaaatttatttttagatattttattcttttgtatgctattgcaaatggaatggtttcctttttcttttcatattgttctttgctggtgtatagaagcacagctcatttttacctgttggtctcgtaccctgtaaaattgtgaaattaatttattagctctagtaagattttgtgggctttttggatattctagacatagaatcatgttatctgtaaatagagagagttttactttttactttccgattttcatgccatttatttatccttattgcttaattgctcttgctagaacttccagtacaatattgaatagcagtgatgaaagcaggcatccatgttttagaggaagcttttggtttttcaacattgattataatgttagctgttcatcagctcttcatcatgttaagtaagattcattctgttcctagtttgctgagtgattttattacgacagggttttagattttgtcagatgctttttttgcatcaattgagatatgaaattgtttccctttgtgtattatgttgactgattttcttatgttcaactgtctttagattagtgggatgaaccccactttatagtcattgtgtataatccttataatacgctgttgcatttggtttgctggtattttgtaggagaattttctatctatattcataagcgatattggtctgcagttttcttgtggtgtctttgcctgcccttgggatcatgttactactgaactcctagaatgagttaagaagtattgttgctggaagattttgagaacgattgatgttaattcttctttaaatatttggtagaaattaccagtgaagccatccgttcctagattttttttgttgaaacattttatttttgattttatttttactttaaaaaaagttatgggatacatgtgcagaacgtgcaggtttgttacacaggtatacatgtgccatggtggtttgctgcacctatcaacctgtcaactaggttttaagtggtatttgtctgaatgctctccctcccctttcccccaacccctcgacaggccctggtgtgtgatgctcccctccctgtgtccatgtcttctcattgttcaactcccacttatgtgtgagaacatgcggtgtttagttttctgtccctgtgttagtttgctgaggatgatggttcccaacttcatccatgtccctgcaaaggacatgaactcattcttttttatggctgcatagtattccatggtgtgtatgtgccacattttatttatccagtctatcattgatgggcatttgggttggttccaagtctttgttattgtaaatagtgctgcaataaacatacatgtgcatgtgtctttatagtagaatgacttataatcctttgggtatatacccagtaatgggattgctgggtcaaatggtatttctggttctagatccttgaggaattgccacactgtcttccacaatggttgaactaattaacactcccaccaacagtgtaaaagtgtttctatttcttcacatcctcaccagcatctgttgtttccatacattttaatgattgccattctaactggcttgagatggtatctcattgtggtttttatttgcatttctctaatgaccagtgatgatgagcttcttttcatatgtttgggggcctcataaatggcttctttacagaagtgtctgttcctatcctacacccactttttaatggggttgtttatttatttcttgtaaatttgtttaagctccttgtagattctggttattagacctttgtcagatggatagattgcaaaaattttctcccattctataggttgcctgttcactctgatgatagtttcttttgctgagcagaagctctttagtttaattagatcccatttgtcaattttggcttttgttgccattgcttttggtgttttagtcatgaagcctttgcccatgcctctgtcctgaatggtattgcctagattttcttctagggtttttatggttttaggtcttatgtttaagtctttaatccatcttgagtttacttttgcataaggtgtaaggaaggggtccagtttctgcttcctgcatatggctagccagttttcccaacaccatttattaaatagggaatcctttccccattgcttgtttttgtcaggtttgtcaatgatcagatggttgtagaggtggggtgttaattctgaggcctctgttctgttccatttttctatatatctgttttggtaccagtactatgctgttttggttactgtagtcttgtagtatagtttgaagtcaggtagtgtgatgcctccagctttgttctttttgcttaggattgtcttggttacacgggctcttttttggttccatatgaaatttaaagtagtattttctagttctgtgaagaaagccaatggtatcttgatgggaatagcaacgagtctataaattactttgggcagtatggccattttcacgatactgattcttcttatcaatgaacatggaattttttttccatttgtttgtgtcgtctcttatttccttgagcaatggtttgtcgttctccttgaagaggtccttcatgtcccttgtaagttgtgttcctatgtattttattttctttgtagcaattgtgaatgggagttcactcatgatttggctctgtgcttttctattcttggtgtataggaatgcttgttatttttgcacattgattttgtatcctgagactttgctgaagttgtttatcagcttaaggagttttggggctgagacgatggggttttctaaatatataaaatcatgtcatctgcaaacagagacaatttgacttcctctcttcctatttgaatacactttatttctttctctggcatgattgctttggccagaacttccaatactatgttgaataggagtggtgagagagggcatccttgtcttgtgccggttttcaaagggaatgcttccagcttttgcccattcagtatgatgttggctatgggtttgtcataaatagctcttattattttgtgatgctgagaagaatgtatattctgttgatttggggtagagtcttctataggtgtctgttaggtctgcttggtccagagctgagttcaagtcctgaatatccttgttaattttctatctcgttgatctgtctaatattgacagtgggttgttaaagtctcccactattattgtgtgggagtctgtctttttgtaggtctgtaggaatttgttttatgaatctgagtgctcctgtattgggtgcatatgtatttaggataattagctcttctttttgcattgattccctttaccattatgtaatgcccttctttgtcttttttgatttaaatttgttttatcagagactaggattggttttttttttctttctatttgcttggtgaaatttctccatccctttattttgagactgtgtatgtctttgcatgtgagatgggtctcctgaatacaggacaccaatgggtcttggctctatccaatttgccagtctctgtattgtaattggggcatttagccgatttacatttaaggttaatattgttatgtgtgaatttgatcctgtcatcatgatgctagctgttttgcacattagttgatgcagtttcttcatagtgtcattggtctttgtattttggcgtgtttttgcagtggctggtactggtttttcctttccatatttagtgcttccttcaggtactcttgtaaggcaggcctggtggtgacagaatcccttaggatttgcttgtctgtaaggattttatttctccttcgcttatgaagcttagtttggctggatatgaaattctgggttgaaaattcttttctttaagaatattaaatattggccccactctattctggcttgtagggtttctgcagagagatctgctgttagtctgatgggcttccctttgtaggtaacctgacctttctgtcttgctgctcttaacattttttccttcatttcaaccttggtgagtctgatgattatgtgccttggggttgctcttctcgaggagtatctttgtggtgttctatttcctgaatttgaatgttggcctgtcttgctaggttaggggaagttctcctggataacatcctgaagtgtgttttccaactttgttccattctccccgtcactttcagggacctcaatcaaacgtaggttttgtcttttcacatagtcccatatttcttggaggcttttttcattccttttcaatcttttttctctaatcttgtcttcacgccttatttcattaagttgatcttcaatccctaatatcctttcttcttcttgattgatttggctattgatacttgtgtatgcttcacgaagttctcgtgctgtgtttttcagctccatcagttcatttatgttcttctctaaactggttattctagttagcagttcctgtaaccttttgtcaagattcttagcttccttgcattagattagaacatgctcctttagctcagaggagtttgttattacccaccttctgaagcctactttgtcaaacccattctctatccagttttctgcccttgccggagaggagttgtgatcatttggaggcgaagaggcattctggtttttggaattttcagcatttttgcactgttttttcctcatttttgtggatttatctacctttgatctttgaggctgaagaactttggatgggatttctgtgtgggggttctttttgctgatgttgatgttactgctttccatttgttaggttttcttctaacagtcaggcccctctgtggcaggtctgctctagtttgctggaggttcaccccagaccctgttttcctggttatcaccagtggaggctgcagaacagcaaagattgctttctgctcctttctctggaagcttcatctcagaggggcaccagcctgatgccagccagagctctcctgtatgaggctcctgtcaccccctgttgggaggtctctcccagtcaggaggcacaggggtcagggacccacttgaggatgcagtctgtcccttagcagagctcgagtgctgtgcttgtagaaccctccttgtcagggtccactgctctcttcagaagtggcaggcaggaacgtttaagtctgctgaagctgcgccgacagccgcccctttcctcgggtgctctgtcccagtgagacgggagttatatctttaagcccttgactggggttgctgcctttctttcagagatgccctgcccagtgaagaggaatctagagaggctgtctggacacagctgttttgccacactgtgttgagttccacccagtccttagcacagtcaggggaaagccgcctactcaagcctcagtaatggtggatgtccctccccacaccaagctcaattgtcccaggtcgacttcagactgctgtgctggcagggagaaattcaagccagtcattcttagcttcctgggctctgtgggagttggacccactggcttggctccctggcttcagccccctttccaggggagtgaacagttctgtctcactggggttccaggtgccactgggctaagaaaaaaaaaaaaaaaacaaaagctcctgcagctagctccgtgtctgtctgaacagctgccagttttgtgcttgaaacccagggccctggtggtgtaggcacatgagggaatctcctggtctgtggactgcaaaaaccatagaaaaagcatagtatctgggccagatagcacagtctgtcacagcttcgcttggctgggaaagggatgcctctgctccttgcacttcccaggtaaggcgacaccccaccctgcttctactcaccctccgtgggcttcacccactgcctaaccagtcccaatgagatgaacagggtacctcagttggaaatgcagaaatcacccaacttctgcattggtcttgctgggagctgcagaccagagctgttccttttcggccatcttgccagcagatgcccctgtttttgtatttttatattgatatatcatagttgtatgtatttttggggtatatgtgatattttaatatgtatatacaatgtgtagtgatcaaatccaggtaattgagatatccattacctcaaaaatttatctttgtgttgggaacattccaattcttctcttctagctactttgaaatataaaacaaattattattaactataatttctctgttacaagggaggttttgtttagtgtttcaatctctttatttgttataggtattctttgaaaggtcttccctccttaacctcccttcacaaagtactacatttcctttcccttctttcagaaatgactttctctcataggtgactttcctccctcatctctcccaagaccttcttttcagtacctccatcacatgggactaaccttcttcaccacaccgctgaaaccactaacctccatcatctcctctcttaaagcttttccacccctaacctcacttgctaacctcccttacttcaccacacatttcctcaatctcctcccttcacaaaagtctttccttgctcatttcccctcatgaaagcctttctttactcaccttccatcacagagtcctaccctcccgcatgttcactcacaaatgctttcttttatctctctctaaaggcttcctaccacacttctgaaaaagtgcttacttttctcacctcagtcgtggaggcctttaattcctcaactcttcactaaaattccttgtcttccttcacaaagacctttctccctcatctcctctcacaagggcctttcttctttcacctccctcatgaaataataacctccttcatctcctcttcatagtcctttcttatctcaccagtacattccctgcctcacctttgcttatatagttccaacctcccttatctctcctcacaaaggtataccctccatcttctcctctaccaaaatcttctttccatgctctcccctaacaaaattctaacctctttcacctcccctcacaaagacctaatcttctttcatggttacctttcctgctttctttaccttcacaattgacttccttccctgctcaaaggcctccttccctcaagtcccctcacaaaaccctaactttctcacctcctttcccaaaaaacttccttccttcacttatcatcacaaaggccttccttctttttttttttttttttaatttatttttttattgataattcttgggtgtttctcacagagggggatttggcagggtcatgggacaatagtggagggaaggtcagcagataaacaagtgaacaaaggtctctggttttcctaggcagaggaccctgcggccttcagcagtgtttgtgtccctgattacttgagattagggattggtgatgactcttaacgagcatgctgccttcaagcatctgtttaacaaagcacatcttgcaccgcccttaatccatttaaccctgagtggacacagcacatgtttcagagagcacagggttgggggcaaggtcacagatcaacaggatcccaaggcagaggaatttctcccagtgcagaacaaaatgaaaagtctcccatgtctacttccttccacacagacacggcaactatctgacttctcaatcccttccccacctttcccgcctttctactccacaaagctgccattgtcatcccgtcccgttctcaatgagctgttgggcacacctcccagacggggtggtggccgggcagaggggctcctcacttcccagtaggggtggctgggcagaggcgcccctcacctcccggacggggcggctggccgggcaggggggctgaccccccccacctccctcccagagggggcggctggccgggcagggggctgaccccccacctccctcccggacggggcggctggctgggcagaggggctcctcacttcccagtaggggccgccgggcagaggcacccctcacctcccagacggggcggctggccgggcggagtgctgacccccccacctccctcccggacggggcagctggccgggcggggggctgaccccccccacctccctcccggacggggtggctgccgggcggagacgctcctcacttcccagatggggtggctgccgggcggagaggctcctcacttctcagacggggcagctgccgggcggaggggctcctcacttctcagacggggtggttgccaggcagagggtctcctcacttctcagacggggcggccgggcagagacgctcctcacctcccagacagggtctcggccgggcagaggcgctcctcacatcccagatggggtggcggggcagaggcgctccccacatctcagatgatgggtggccgggcagagacgctcctcacttcctagatgtgatggcggctgggaagaggcgctcctcacttcctagatgggatggcggccgggcggagatgctcctcactttccaggctgggcagccaggcagaggggctcctcacatcccagacaatgggcggccaggcagagacactcctcacttcccagacggggtggcggccgggcagaggctgcaatctcggcactttgggaggccaaggcaggcggctgggaggtgtaggttgtagtgagccgagatcacgccactgcactccagcctgggcaccattgagcactgagtgaacgagactccgtctgcaattccggcacctcgggaggccgaggttggcggatcactcgcggccaggggctggagaccggcccggccaacacagcgaaaccccgtctccaccaaaaccagtcaggcgtggcggcgcgtgcctgcaatcgcaggcattcggcagactgaggcaggagaatcaggcagggaggttgcagtgagccgagatggcagcagtacagtccagcttcggttccgcatgagagggagaccgtggggagagggagagggagaggggccttccttcttttaccctcacaaatgccttccctccttcatcaccattccaaaagtttttcttgtccttcaatcaaggtcctttcatttctcacctccccacaatgactttcctttgctcacttcacaggccttttctcaaaagcttttcattccttatctcacagagcccttttctcctctcttaaagtcttcagtcccttacttcccttcttttaccttatatcatcctctccctctctaagctaccttcactaaggccttcccctctccctcaaattccttctcttacctctttatttaccctcctccaggccttcactcactccctctcagaagcctactttcagctctccaaaagttcttctccccactcaggttttccttccttcaccacccaaaggtactttccacttcttccccaaaagccttcttttcttccttccacttaatggtctttctgcctcacttgcttcactcaaagtctttccctcctcctccagattctcccaacctgaactgcttttccttttcctacaaccttctttccttccataaccttcctaagtctcagatggttttctcaaaacagctttctcaatattacccataatggcgtgccttttctcccaaccccctcacaaacgtattttatgttctcatctgcacaaaggccttagatttcccacagtctcctgcctttgagctccagacccaagcccaaagacttcagcatccccacctctaatcccaagggcttctttctccctgctctccctagaggttttccgtcttctcaaccaaggtccacccacagtcaaagagggaggcaaagattgggcagtggcatcacaactaaaaagaatagagacttctatacactatgtcacaactacatgggtttctaggtttttgtgaggaatgaaattcataattaaataaagtatatgctgttttatcaattatttgaaataagttagaaaatatgatttctgttctttgaaaaaatgttaagatatttttaatgatcatttacaaatcataatattactacaaattattcaggtttatttctactatttatctaaaacaccaaagtatttctgaattactgtatttgtaatagtacaatactaaaagtcttcttatcctctaaaaaagtaagctgaaaaacaaaactataaattgtgtattttttcttagtcagcgagttcttcattttctatttctattttgagtagaactcccacacaaaaaagaatactgtctaattcagtgtgatttctttatttccaggagtactttttccattataggtctaacatgttttctcctaaaataatctatgattcattctttacattgttagatttcccagattctcaggaggtaatatgtgactgtatgaattaaatttaatttgcatttaaaattatttcacttaattaacataacaaaatgcacttgttatgggttgaattgtgttccctcaccaaaaacagttgcaattataaccccaataccttatttgtgatcttgtttggagataaggtcttcatagagataatcaagttaaaatgaggtcatctgaagtgtattttaatccactatgaatggtgtccttataaaaaggggaaacttggatgcagagacagacacccatacaggaaagactatttcaacctgcaagccaaggagaggcgtttcctcacaatcctcagaaggaaccagccctactaacaccttggttttggacttctagcctccagaggtgtgagacaataaatttctgttttaagccacccagtttatggtatgttgttacaacagccctaggaaactaatatacatcagaaggtaaaataattgtccatggtcctgtagaattatggcaaaagcaaaacatatggttctgacattaaaattccctttctcatttctagacggaccctagtgagttctcttagatttaatggtactgacaggaattgaagttgagtgacctgaggtaactctgggatatacctccagtttgtattgtcatttgcattcccaagccacattgcctttcaagttatatttatgcagaagacgtacagaccagtggcatacaggataaggagagaagcaaactgtggactgggagtttgattccaccaataatctgtaacctattcagtcagtcctaattgctcatccttttcagggaaatttaaaaaatgagaaataaagatggactagtaggtaatattttcaaattgccttagctgcatggacagatctcagtaactagtttctgtatcattatattagaatactttatttatctgatatccttggggagtgaatgaggcattacacatagaaagtctggctgcctgccgtgtacctaattgagcacgaggctagcttttgctttaaccctgtgtacgtgtggtgtagttggaggagccctaagctaggaatcaagagatctaggttgccctgattgttcacactaacttgctgtgtgaccattgatgagtcattttacctctttaggcttcagttatcttatcgaaaaaatgaagaaatttcactaggtgggcatttttcctgttcagtcaaaatgcttggttatcttaatgataccagtcattcatattttcctttaagctaccttacttttttacattaatatatttatttaaaaagggaactgtaccatagttataaatggaaagttgaccatatttgctattaagaaagttattaataaaaataaatatcctgaaaacaagtaatgatattaaatttaaaattgtaagcaataaaaataaacgatgaaagacatgtaacaaactgttttgcattgtattaagcccttcacatgtgacttcatttaatcctcataacacttcaaaataaatatcaccattttgcagatgagtaaactgaggcaacgagaagtttactgacatgctcaagttcaccacctagtatgtggcagagtcaggatacaaactcaggtctgtttgaggccaacacccagaaagatagtggcataggtagaccctcaacttgaagcctcagtaaaatcctttagaaactgatacagttagccactgctctttctgtctcctcaccctgtcattcagtttctcatctattagacctcacaccacagcggggatggggggggcgggggcaacataatttgtaaaatgaaaatacaagatctctcatttaaaattcatggttttcaaaatggcgatagcaaaacattaaaccaagcatggagctccccaagtgtggggccctgtttgactgcacaagtcacatatagatgaagctctctgtctgcactgagtctggtgtttcttttccgttgaaatgtagttagatttttagtcttttatttgtaacagggaaattaaaaaataaaaaattctttgtgacaaggaaacataattcgttctttaatattttctgctaccaatttaaaaggctgactcctaatcttttatttgctgaacatgctaatgagtgtaaagatgcaaattagaggcaaagaggatgacattattcttcatatgaaaaataatggaggaggggaaaaaggctggaggctgtttgggtagagaggaagacctgagaaaaaggcttgtgtgctagctggtgggagactttggagagagttaaagaggaaaaggaggcaattgtcccagggaagaaagagcagggacaaaagtttataaagcctaagcaaaaagaacaaagctggaggcatcacactacctgacttcaaactatactacaaggctatagtaaccaaaacagcatggtactggtaccaaaacagacatacagaccaatggagaagaacagaggcctcagaaataatgccacacatctacaaccatctgatctttgacaaacctgtcaaatacaagcaatggggaaaggatttcctatttaataaagggtattggaaaaactggctagccatatgcaggaaacagaaattggaccccttccttataccttatacaaaaactaactcaagatggattaaacacttatgtgtaagacctaaaaccataaaaaccctagaagaaaacctagacagttccattcaggacaatggcatgggcaaagacttcatgactaaaacaccaaaagcaatggcaacaaaagccaaaattgacaaatgggatctaattaaactaaagagcttctactcagtaaaagaaactatcatcggagtgaactggcaacctatagaatgggagaaaatttttgcaatctatccatctgacaaaaggctaatatccagaatctacaaggagcttaaacaaatttacaagagaaaaaaaaaccatcaaaaagtgggcaaaggatatgaacagacacttctcaaaagaagacatttatgaggccaaaaaacatatgaaaaaaaactcatcatcactggtcattagagaaatgcaaataaaaaccacaatgagataccatctctcgcctgttagaatggcaatcattaaaatgtgtggaaacaacagatgatggagaggatgtggagaaacaggaacgcttttacactgttgatgggagtataaattagttcaaccattgtggaagacagtgtggcaattcctcaagtatctagaaccagaaataccatttgacctagcaatcccattactgggtatatacccaaaggattataaatcattctagtataaagacacatgcacacgtatgtttattgcagcactatttacaatagcaaagacttggaaccaacccaaatgcccatcaatgatagactggataaagaaaatatggcacatatacatcatggaatactatgcagccataaaaaagaatgagttcatgtcctttgcagggacatggatgaggcttgaaaccatcattctcagcaaactaacacagggacagaaaactaaacaccgcatgttctcacacataagtgggagttgaacaatgagaacatatggacacagggagaggaacatcacacaccagggcctgtcagggggtggggggctagaggagggagagcattaggagaaatacctaatgtagatgacgggttgatgggtgcagcaaaccaccatggcccatgtatacctatgtaacaaacctgcacattctgcacatgtatcccagaactcaaagtatcaaaaaagacaaagtttataaagatttgccctatggcaagtgatgtcagccgtgtttggtgtcatggtaggtttgatatgttactcatttttttcttttacactttcaaataaactcatagcaaacattaatatatccataaatattcatctatgttccacctaaaattcttatgtactactagtgatagactacactttgagacatactgctcaaattaatttaaaaataattttctttcagagtacggaagaaaccaaaggtggagggcagggtaaaatatattctagacttatggttgagactgccactgatgttgctcatcttagttaagatgtttaattgtcgctttcatttcaatgcccattgtaatgaccgaaagatctataaagggtgaaaacctggagaacctagaaagtttccatctggcatctatatgccagaaacttggagggttctctgaaagataaaaacatgatggagagaaatcacagcaacttgtgtttcatgtcaagccaagggcaagcctgtccagcagggtctggaggctagggcactctgagttggggactctaagttgggggatcaatattctagaggaattccagagagcacataacttgctgaatataacttaggatggagacttgggcctcagtgtgctactgtcagccaacacttacttcagatggtgtgctgaatcgagtggcaacaaggacagcaaattgacgaaggggaacactgagcaaacaaacagcaatatggaactaaagtcttgtcaaggtcccttccatctgtagctcccttctcatgtcatgtaggacagagggttctctgatctggcaaaatgtgcctagcaacattaatctcatttcttgtccttgtgctggaagcactctcccaggccctttgttcagccagctacttctagtcttttttttttttccacttaaatatcatctcctcagagagactggctcccatttaaagtagcccccctcctttattctgtatcagtatccacttttcttcatagcactcattacaatttgtaattacttaatttgttagtggtctgtcttctccactgcattgtagtaagctccatgagggcagggatcttgtctgacttgttcactgatatatcctcaaaacacagaatatagtgggtgttcaataatgagtaagcattagtagaaaacaagcaggacaaaatggattatgtttaatattgtcaaggtgtaatatatagtgaagataaaattgtcatgattgaatatgcactattggaatatatgaaacaaatagttttagaaatttaagtagaaatcgtcaaaaccacaatcatggtgagatactttaatatttatcttttagtccttgacagaaaaataaagatacagagcatttgcataatataatttagcttgatttaacatttataatagagttcattgtgagagtacacattcaaatgtatgtgtatggaagttgctctcattaaaatgagaaagaagatattatcattgatataaaggagatttaaatattacaagtgaatagtcttatgattccatgctaataattgctttgtaaatagatgatttcctagcaaaataaaaataacaaaattaactgtgaccatgaagaagcaaaagataaagaactacccctctccaaaaaatgaagactcagactttttctggatgagttttcccaaacctttaatggatcaaatcattcctatattgtttcatctgttttagtctagaaaagcaacaggaagcttcctaggttattttatgaatgaaacaggtataactcttatgccaaaatttacagatgtagcacacaaaagaaaactgcagacacacttcacttaggaatgttgaatcatgaatcctatataaaacattagcacttgtggactttgttcaagaatgcaagaatattttaatattggcaaatatattaataacattcaataattaataggcagggggaaatatcatcatggcagtaaatattaaaaggatttgatagaatcccagttctatccctgattcaaaatgaaacaaaataacaacagaaaatttgtagaaaactaaaactagagaaatacatccttaatttaataaagggtatctatcttacaccagcagccaacattatacttcattatgaaatattagcacattcccattaaagtcaggaatgactcaagaacgcccattattatggttattaatcaacatagtttaaacatttctaggcaatacagtgaaagaagaaaaataattcaggtgttaatattgtaaagaaaggagacaaagtcatctatatttagtgataatattattgtctatctggaatgaaactgaagaacaatgagaactaacgagagttaactaagggaggaagaaaatatatgtataaaaatcaatagctctcttacataccatcaatccactagaaaatgtggtgaaatggattatgttcacaaaacaacaaaatatatatgatgcctgggaataaatgtactaagaaaagtgcagggcctatctgaatacaatgataaaccttattcagggacataaaaagagacttgaatgaacagagaaacaaaactacttaggtgaaaaaattttgtaacattatcaattctctccaaatgagtctacatttaattgaattcatgcctagcacgtgggacacacaataaatgatttttgaatgaatgataaataagtgaacataattaccataaaatttagaattttttttgacttgacaaaacgattttaaggttcatctaaaaaattctcagagctgaaaataaaatttgatagtagagacaatgaaaggattaccagatcagttattaaaacataatgacataagataggccgggtgcagtggcttacggaggcctagacaggtggatcacgataccagcctgggaaacatggtgaaaccccgtctctactaaaaatacaaaaattagttgagcgtgatggtgcatgcctgtaatctcagctactcgggaggccaaggcacaagaatcacttgaaccaggaaggcggaggttgcagtgagctgagattgcgccattgcactccagcctgggcaacagagcgatactctgtctcaaaaaaaaaataaaagaaaagataaaataaacaataacattagtattggcacatgaatagataggttggtggaacagaatagaaagtcaagaagcagatctatgactataaggatatagtaaggatttagaatgtgatgatgttatcttaagtataacagaaaaggatggatttaataaagggccttatgactgctggaaaaatcgtatccctactccacaacacactccaaaatatactccaggtgtattaaatatttaaatttaaaaagtacaaccatgaaaatgttgggagtattagagtatagaatgcctttatagaggtaaaaataataaaggaagagattgatagatttaattacatataacattttaagcttctgagcttcccaaacaccataaaaaagtaaggataaccaattaccttgaaaaaaatattttaaatatgtggcagattaagagttaagttctctactatgcaacacaatatgaaatatgtaagctcactgattatgaaagttgcaaattaaaacaaaagatattttgttttattttggccatcaaattggcaaataataaaaaatggagaggtgtcagaaaactggcacttgcctgtactactggtagaagtgtattttagggttgccctgctggagggtaatttggacatactcaagagccaccatgccttaagaatttatcttaagtaatttttcatgaatatttgcaaatatataaatataaagcttcagtgataatcattgcaagctaacgataatgtaatgataatcattgcagtgttctttataacatcaataaattgtaaacagcctaaatgttttcctatggagaaattgctaactgagttataatagagccatataatggaattctgtgacattattaaagatagttttgggaaatatttaatgctatggacaaatctgtgttatcctcttctctcatgtaggagggaattgtgtaaataagactaaaaaccagttctttaaaatagtgagaaagaaggataaggaaggttttactgtatgtaaggccttgatttttgtcaatatatatgtaagccaacatattttccaagactttctgtgatgggatctgatttagttggaatacatactgttttcagctcatcagttgattaggcctcttaatgccatttgtcagaggcaagtttactattgtaaatcagcttacaacaatggcatgtgtcagcctatagcttaagcatttgtaaatttaacactttttcagtttcacaacaaaattgcattctgattattaatgatgcttaagctgttatgagatgaaagtatatctgttagctatttgacattctataattaatttaagcaaaggtaattaccattcaagggtcattgaaagtgataaatgctttatatgttgggattaataattttacttcttcttaagggtcctcatattttgtgcttgcaaatggacatatcctgcccaacagtgaaaatgctcatggccaatctctggaagaagattccgcattggaagctttgctgaattttttctttccaacaagtaagttcttgtttgatttttttccccctctaatgttcttgttttgaaaacagtaattaaatgtttaggaagcagtgtggtgtaatggcactggagtgggacagagctgagtttgaatcctggctctgctctttggcttaggcaagacaatctctctgaacctcagtgccctcatctttgaaatgaagatatttaccacaaagaattatgaggatgaactgagataatattcataaggcatttcataaatgtttgttactgtttataaaatacttttccttcgcaaatatctaatctttcacaatttgcctgaatggcattgcctgaaattcagtcactgacccagtattgtgaaattgatgtcttctgtggcattagtgagggtactgtgtgactgatgttatggaatatgccagatgttttcccatctgttttaatgatagaaatcccaggtttcaagtctcactgtctttttgtgattctgtatataatgtgtttatcaagcacattatgacccctgagaattattaaccacaaataaacacgtttcattttgtatagcatgtggtgccctttcaaggagaagcttcatataaattggaatatgtgaagtacaaagataaagctcttatgaaaaatcatgcagaatttattctaacaaaatttgatatactctataagcacaaaattatatctgttctttgattccaggcctttccactgaattctttagtgaacttgaaaaaatctctttatgtttctttatacttgttacattaagtttaaaacaggcatctaccaatgagaatagcaaaataaacaagttccttaaataaactcaaaatactgccatggtcaaattgagtaaataaaaaagaaatctgagacggtgttatgtcgtataggctgaaagaatggtttgagtgccacagttagtcgtaaacaacaactaatgatgatttaagctttaaagcttatgaaaacaacagatgtaaacagtcacatacttacctgtaataactacattgtacagacactgaagccacctgtaaaaatggttcgaaaaagatatctgcatttcccaaatatttctccaacctggtgcaggaaagtaagtcaaaatcaattatatgaagtaaaaattttgtccaacaaaataaaattgttccattttaatagaaacatctgacctaggttgattcaaaaagtgattaaatatttatcaaatgtacatactgtctttgaagacaataactacagcttcataaaacgtgaaatatttttaaccaatttatttcttcccccacataattgaaaataaacactcttaccacttaagcatgaaaaaaaagttcgttgttttgccattaggctactatttgtaaaatatttatctcttgcagattaaaatgacaaccttgatacacactggcagggaagcttgagagatcacctgatctttctccctttggacaaaattacatacttaaacctgacaaaaaaaaattgttctacctttttgattctttaaaattaccaatgcctcttagtaatttgagcttgaaagttaatttgtttttgtttttttgagacagagtctcgctctgttgccaggctggagtgcagtggcacaatctcggctcactgcaacctctgcttcccaggttcaagcaattctcctacctcagcctcctgagtagctgggactacaggcacatgccaccacgcccagctaatttttgtatttttagtagagacaggttttcaccatgttggccaggacggtctcgatctcttgacctcgtgatccgcccgccttgggctcccaaagtgctgggattacaggcactagccatcgtgcctggcctgtgttaattttaatatctagcataaagtccatcagatgcacttaaagcagaaattaacagatgatcttagagatcatatagtctagtctcttctacgatttaaccctaaccctaaccctctctttagcatttctgggaagtggtgtttgaacagtacccatggtgagaaactcagcatgcaaggaaatccatcccatctctgagtagtcctgactattgtcaccattttctgggtgtttgacacccagaactgaacacttgatgcaatccaacctaggggagaagagccgctctgggcctagcagaattgaagaacagattacttagaatatagaacaacaagtaggataaactctcatgtctaaaatgtttggaaaatgagtgtctaggccagttggtagtgcattaaatttttgatcttgcataagttactttgatcctttattatttttaaaacagagattgtaaaactcaatttgggagtttgttgcaaagattagtaataaagtgtgtaaagcaaggttcctggcccaaacaggtgcctaaataatggtagatattattatttttaccttggcttcagcaattgccaatctttaaaaaagaggaatgtagtaaaatatactgaggttaaaatttgcataaaacaattacgttgttctttgctgatgttgaagtgctttagtgattataaaatatcagttactacttttaagtttgtaattgttgatagtataagagattgaaccgaatctattctggccttaacacatagacatactgtggaggtttttctttttgaatgaaaatctaatattgtgctttttagtttgtatttgtttctcttataaagcaggatattatagaaaataagctatttgagcttgcaggtcttttagattcaggtatgtacgaatttattgcagttgcataatcttggtgttaatgccataaatcattgcctgtttaaaattatagagtcataatttaagggtgaaacgaagaatcttaaaatatattatagtgccaatatgataagtgttcacaaaaagtaggtcaatgccagtgtatcacttactttagtcactagcagcaaactatgtaatttttacttagttctgtggcttagtaacgttaagccggaggatatatgtgggatcattttaacaagggattagttttaaaagcatttgacttgttgttatttagttccttctgtgttatatttgcatcatcaccactcagcacatgatttattgtccttttaaactatcttaccaaagattttttaacaacttgtaattttctgcaattcacctagatttgaaaatgtgatattaaataacttagtggtaacttttagcttaagtcttattttcttttagcacccatcattagctgtatatgccattaaatgtttgcttttcttctttgtcttccagtaattatttaattagggaaagtggtaactaaccatgctgaattctctttcttaaatttctgtttttaaaagcttgcaatctgagggaaaatcaggtggcaaagccttgtaatgagctgcaagatcttagtgagagtgaatgtttgagacacaaatgctgtttttcatcatcggggaccacgagcttcaaatgttttgctccatttagagatggtaagttattcctctttcatttatttctattttttaatattaaataaacagatcgcagtggcataagttcatatttggatttcctagcttaatacttaaatgggactcccagtcctagagcggtgctccttagaaggtcctgaggtggtcatgactctggtcaggagcagtttttgcttagcctttggatggtgactttggtaatacaaaaattagtctcacattttcttttgctttagtcactctctgtgttttgtccaaaagtttccaggctctatggaaccctcaatggctgagagaagataccggttgggcatgccttagcttacttctctttgcccagcttttcctcctaggtagaattcttcccatttgtcttgtcttcatctcagtatgtaacagtagacttgaatgtttcttgttaaggtctgcttattagtttttctttattgggtattttttgagatagcatctcactctgttacccaggctggagtacagtggtgacgtgatcacagctgactgcagcctcgacatccggggctcaagtgatccacccgcctcagcttcctgagtagttgggactacagacgtgcaccagcaagcccgactaatttttagtttttttgtagagacaaggtctccctaggcttcccaggctggtctccaactcttgggttccagcagttcttctgcctcggcctcccaaagtgctggaatttataggtgtgagccaccacaccgagtcttgttctatagtttttgaattaggttcttctgaatatttttttctttacaaagttttgagaactacaccatctgtttttgctaccttcatttggatattggggatgtatttccagttgctctcatgatgcatggatttgatatgatgaaacactaatactacaaaaaggatgcatgcaaaataatatcttaagttaatatagtccctattcaatttacggctttttgttgaatatgtagtattaatactggaaactaaaacctgatcgtgaatataatattacaattttaacactgtcacatgttatttgtaattcatttatcagtttggtctttatattatgtatgaagcaacatttggttcttgcagaggaaaaaatttaactgtgacttacaattccccaatcacattagaatgcattttccgatgaatataagactaaaatatgcttatttcacctgcacattcttgattccttgtttaatttaatattttgtaatttggaagtaaacctgcagcatctggttattcccagtctcccatccaagcactaaccaggctagaccttgcttagctcacaagatcagatgagatggggcacattcaggatggtgtgaccatagattaagaagctatttatttaccaagttaacggttcatagattaatgtgctccccaagtgctctaggatatacaacatatggccaagagaaaaagccaatttagggccagaggaagaaatatcgtatgcatcatagtaatcaatgatggtacaaaaaataggatcattttgttaaggcttcattaaggggtacatattgaaagtgtagccttcagttgtatttcaagaacatttcatgaactcctgttccttataaagtagcaaggatatttacctgtcacataagaatacctcctcatttcactttattaactgatagtttctttataaagactttatgaaagaacttggatttacttctcttgcttaagtcatgaaagtaacaggatataattaaaccaacagtgcctaaacagatgatgcaaatgtttgggcttggtgcgatcagccttatcctggtatgtctgcccatttattgccgctctcttttctggaggaggtaggtgaacataaacttttatttgctcgttgctaagtatacatgagtatttgtgtatagacatatttattaatacacttcagaaatacagggattatgtttgggttctttatgttgaaaatatggtagcttgggaaagacctaaaactagagttgccataatatgtttttaaaatgcatgttatcggccaggcacggtggctcacgcctgtaatcccagcactttgggaggccgaggcgggtggatcacttgaggtcaggagttcgagaccagtctgaccaacatggcgaaaccccgtttctattaaaaaaaaatacaaaattagccgggcatggtggtgcacgcctgtaatcccagctacttgggaggcttaggcaagagaattgcttgaacctgggaggcagaggttgcagtgagccaagatcccaccactgcactccagtctcagcaacaagagtgaaaatacgtctcaaaaataaaataaaatgcgtgttattttatttttccatagattttcttcttgcatagtatctgtacattcccttatgaaacaaacccacaattagaaggaaaaataaattagcaagcttggtgtgtgtgcagtgggggtggctattaactgcaaatcagaacagttcctggaagtgttagtttccattgagtcatctgccattggtctttaatgatcatctactattgggtcataaagccttgatctgtcttcaagccaattggaaaacaaatttcttcttagcatcttatacaaaatgccaatggactactagcatgatgcttccaagctttttttttttttttatagctccccacctatggggacagagtgggtatagaggtacagagcacagtcaggactagagtgaggtgagtgaagcacttagagcacaaagttaagggaagcactcactctcaggtttgtgcgcgtgcaaggtcagcattgtcactaccctgagaataagtacctccttaaattctctgataaagacaaggtgcctgttgaaggttaagcatgttttatgtttttattgaagttaatgtggaagtagtagttgagttaccagaatatggtttagatttcgcaagaagagttagactatatacactgccttactttggatgaagatcatcgaagtgattggcagtaggagtggaatttttggcccttccttcttctcttcaaaggttgattttgtattaaaaaaataaaccatgaataacaataaagtaacatttgctagaaattggtggctaggaatataccatgaaatttagagagtttctaggattataagtttggtatgataacttcattatggtccctgtgttatacctctgcaaaggaattttatgggggtgttcaggtcccctggatttttttttctctaaaatgaaatccaaaggattgtcctctgatcctaatatatttccttctttctacatagtacagactgcttgagaaacaatgtgaataagtgtatatattggatactatacattttggtttactatgttttatttatttattttactattttgtgcaagagcagtatgctccttcggtcatcttgagctgactatcatgacccttggagcaggtagcagattcatcttgctgcttagctgaatttccaggaacaatgattgagagtggatgggcactttcagcctattgtggtaggctgattttagaggcaaggagaataattgtgtaagaacggggaaatcccatccctgatatcaaacaaggagccaagtgcaggacatagtcagcttttgcagggcaagatatctccttagaacgatttccttaactcactttctgttctccatttcaaagaataaagagatagataaaatattagggtaggtaaaataaataacccataaaagagaaatagacacagcagtaaaatcaatatgtggtggcttaaaaaggaaaagaaagaagccaaacacaattgtttgtccaaatcagaggtaccaaaagctattatgactatctgcagtaatgtgatttgggcctcttttggaagacctttttttgctctttcatcattggaagatacccttaagctcctcctcctgctaaatcctgtcttaaacattaaataactgagaattcctttaagaaagagctgtcatagctctcctcttggccttcggttgcaagccaaaacaaacaatgttttggtattccccaacctctgcaatttggacagtgccttttttaaggatcacctaaggagccagcaactgacaagagttggagagcttaaaaaatgagaagcactttgggaggccaaggcgggcagatcacgaggtcaggagttcgagaccagcctgaacaacatggtgaaaccctgtctctactaacaatacaaaaattagccgggcatggtgacatgcgcctgtaatcccagctactcaggaggctgaggcaggagaatcgcttgaacccgggaggcggcagttacagtgagccgagatcgcgtcactgcactctagcctgggcgacagagtgagactccatctcaaaaaaaacaaaaacaaaaacaaaaaaaaaatgtgaagcaatttgagttggtgggagaactaaaagcagtgtaggtgaaaagggtaattatgcaccagagccatatgtacttcagtttttggcgcctaagtcattttttccactattgaccatattcattgaatgtttgcctgtgccgggtataacggaggatacagaaatttttaagatataggccctacttttaaggagcttaaatccaccttaaaacaaatcccaagtatgacacatttaaattacaatataagacgaaaataattaaggactaaaatggatggtagcaataacttacaaaagttttgaagcagtggagatcaggttaagtaggagagggcacgtcaggcttcatggtagaggtgccgtttcaggtcgattttgaagggggacagatttggagtagatagagaggggtccttttcacagaattaattacattcagatggtggtcttctcactatagacaccttaatttatttcatttcctagcagatacagcttaattttgccactgaaaaaatctataactgaatctctagtttacttctacttgacttgagttctagtgtgatatgaacctggtacacagaggactcaagccggtttgaactggttgcacatacaaaaggaagcagagagcattagtgaaaaactttctaagaattcactaatagccatattaaactaacatataagatgtgtttttgaaatttattgtgtccttaaggttatgtaagatctatttttatcctcaatagggatcagaagcttcattaggtataagtgtcactagtaggcttaagcctttgcttagaggagaaggaaggaaaagatcaagtggatagcgacaaaaggaagcaggggagaggaattctaaggggaagagaaaaagggaggtggctgaattgttcttattaacagctattactgtagccagcgacagtagtctcaagtgcagtttctaattcagtttctaatctttatctgtttttagataaagtttaaatctgtgtgtatatgccatttaaacatctgtggattatatagtgatatgatacttgagtgtgtctgtagctttggtaaggtggaaaatttaaacataataccatgcctgttaaattcagatgaagtgcattttcatgttctttttcttcctatcagattgaatttgtaactttgaattaagacaaaattcagaactcagtctgaaaatgacaaaactgtgttttctttcaactaataaaatgtctatttttttttgaagattgtagatcatctgatacacagatgatgtaaaaagcacatcccccatacactttcaatgttgctacttgccagatggctgttactgaaaatttctacatttagaccaatcctgctgcatgattccctgtattataatctggttttcattatgccgctagtcttagtgccacttattttcttacaatgggaggtaaagaactgggaataaatgtgtcaaaaactgcctaaaaatcatcaccctttgaatttaaaaaatagacatttacattttcaatttcccatgtttgcatatctcattatactgtacaatataattagtaatgttattttgaaaagctttatgcagtaattagcgaactactggaaagtttgaagttcctaggattatatacatctggattcagaggaaggaaataaaatctataaattttgaaaagtatgactaggctgtaagaactttgataaaatatgtcagatgagaatgtgagcaaactggaactctgttctagcatgagtcactataggtttgaaattcgtataaagctggtacttcttggacgctgttcatggtaatttaattactgaaataataagagaacctcattatgcggatcatatgtctgaggtgttctcattgcaaggactccaaggacagcattttagagaactctggcatagtaggtactattaaaaagaacattctgttgccaagtaactaataacttcattgcaaaatgaagtgtccttttctcaattcccatttaatttgatctttttgtcacagagtacactgttgactgctcccttcttgaaattttccccccttggatttcattgttcctcttacaattttgatccatctcagtctgcttttctttgttcacccaaatgtggttgtttcccaaagccttactcccatttatcagaaaatgttagaaatatatagtaggaagaacattctaaaagatctgcgttctcattctgctttcaccacgtttcatggatgtgtttaaattctttgagtattgatttcctaacaaaattatagtagagacttgagttagataatttctatggtattttctgaccatagtattccaagagtctctgggtaaattactcttaattccaaatcctaaaatcttcacctctacctgttccatatttccagtcactctcgtgaattagatgttttatcagcacctcaaatgcaatatgtgaaaaagtgaactcattttctttttctcctaaattatctccccttgacccttctccattcctgtcagtgatttctttagtttcccaggctagaaccttagagtctttggtgactatttcttctcatttatcctcaatatataatcttttcacttactctccttgtcattgtgttctgttttgttttgttcttctttggaatgagtctggaatttgccccttctcccattttattgtaatttagtaccagccttgagtgccttttcccattctaggcaagtggcttcaggagaggagcaaaagggaactaagggtagcatctaaagagcgaaggcaggtttcagagctgagaggtcataatgatatatctaatccaagagattcttataggagagacaccatctgagatggggccgcaagtggggcttggaggatggctaggaggtgggttccagagaggtttcctggtacttaaataggaatgtatagcattggccttaggtaaagaggaattaaggatacctgccaaaccagtttggacatatacctggactcctaatctactctccctctaatccatcctgcaatgtcttgccagactcatcttcctgaaatatctctatttcatttcattatatcattcaagaacttctaatgctttcaagaatatctgtgttccaggccttgtgttaggtgctgtgaaggacaaagaagcaaatcagattatgctctgtgctctcaaggaacacacatagtctgtgtaataagggacatatacaagtatccaaagtagaaaatcattgtccgtaaaagaggtacagataaaaagttagcatgtagatggcttctacggaagtaaacttgggaatttttttttttaagacaagttctcgctctgtcacccaggttggagtgcagtggcacaatcacggcttactgcagcctcgacttcccgggctccggcaatcctcccacctcagcctcccgagtacccaggaccacaggcgtgtgccaccacacccaactaatttttgtatatttggtagaaacagagcttcaccatgttgcccaggctggtctcaaactcctgagctcaaggaatccacctgccttggcctcctgaagtgctgggattacagacagaagccaacatgcccagcccgtgggtcctgggcttttcttttcctgggagagttttattatagccttgctctcgttacttgttattggtctattcgggttttggatttcttcctggttcaatttagttaggttgtatgtgtctagacatttttccatttcttctagattttacaatttattggcatatagttgctcagagtagccactattgaacctttgaatttctatggtatcagttataatgtcttctttttcatctctgattttacttatttgggtattctctcttgtttgcttagtctggctaaaggtttgtgaattttatttatctttcttaaaaaaacaactttttgtttcattaatcttctgtattgttttcttcatttcaaatttatttatttctgctctcatctttattatttttattccctaattgtgggtttggtttgattttgcttttctggttatttaagatgtatcattaggctgtttatgtgaagtttttcctctttttgatataggtacttacagctataatcttccctctgagtactgcttatgttgtatcccaggttttggtatatcatgtttccattatcagttgtttcaagaagggttttaatttccttcttaatctcttcattgattcattggctattcaggaacatattgtttaatttccatgtgtttgtatagtttccaaatttccttttgttattgatttctagttttattccattttggtgagagaagatgcttgttatcgttttaatttttttcaatgttttagggcttgctttgtgacctaacacacagtctatccttgaggataattcatgtgctggggaaagaaagtgtattctgtagggttttctctaaatatctattaggtctatttggtgtacagtgcagattaagtctgatgttactttgttcattttctgtctggaatatctgtccagtgctgacagtagggtattgaagtcactagctattattgtacaggggtctatctctatctttagctctaatactatttgctttatgtatctgggtgttccagtgttgggtgcacatatatttactattgctatattccattgctgaattggcctctatcattatgtggtgactgtctttgtctcttcatatagttttgttttgaaatagatttttttctgatgtaagtatagctactccttccctttcttggtttccattggtatggaatgtcttttttcattcctttattttcagtctatatgtgtctttataggtgaagtgtgtttcttcatatagttttgttttgaaatatatttttttctgatgtaagtatagctactcctgctctgtcttggtttccattggtatggaatgtctttttttcattcctttattttcaagctatatgtgtctttataggtgaagtgtgtttcttgtaggcaactgatgattgggtctcatttttatatccattcagccactctgtgtcttttgattggagagtgtagtccttttatattcagtgttattattgataagtaatgacttacttctgccattttgttatttgttttctggtggccttgtggtcttctccttctactttccttccttcctgtcttcctctagtgaaggtgactttctctggtgatatgatttagtttcttgctttttattttctgtgaatccattgcatgttttttgattagaggttaccatgaggcttgcaaatactatctaataacctattattttaagctgataacaacataacattgtttgcataaacagtcaacaaaaaggcaactaataaaaactctacctcatagtttcatcccccaatttttaaactttttattgtttctgcttgtatcttatagtagtcgatgttttgaagagttgttgcagttaatatttttgattggttcgtctttagtctttccacttaagagtagtttatacaacaaagttactttgttataatattttgtggttttctgcatacttattattgccagtgagttttgtaccttcagatgatttattattggtcattaacacccttttctttctcattaaagtattcaatgtagcattttgtgtaggacagatctggtattgatgaaatcccccagcttttgtttgtctgggaaagtctttatttttcttcatgtctgaaggatattttcgttggacatactgctctagggtgaaagagtagtatgtcgtatttttccttcagcaccttatatatatcatgctactctctcctggccataaggtttctgctggtaactctgctgccagacttactggggctccattgtatgttatttgtttcttttctcttagtgcttttaggatctgttgttcatccttgacctttgggagtttgattattaaatgccttgaggtcatcttcttttggttaaatctgcctggtattctataaccttcttgtacttgtatattgatatctttgtctaggtttgggacatcctctgttattattgctttgaacaaacttttaccccatcaccttctctacctcctttttaaggccactaactcttagatttgtccttttgagactattttctttttttttcttttttttaattttttaaattttattattattatactttaagttttagggtacatgtgcacaatgtgcaggttagttacatatgtatacatgtgccatgctggtgcgctgcacccacattaggtatatctcccaatgctatccctcccccctcccccgaccccaccacagtccccagagtgtgatattccccttcctgtgtccatgtgatctcattgttcaattcccacctatgagtgagaatatgcggtgtttggttttttgttcttgcgatagtttactgagaatgatgatttccaatttcatccatgtccctacaaaggacgtgaactcatcattttttatggctgcatagtattccatggtgtacatgtgccacattttcttaatccagtctatcattgttggacatttgggttggttccaagtctttgctattgtgaatagtgccgcaataaacatacgtgtgcatgtgtctttatagcagcatgatttatagtcctttgggtatatacccagtaatgggatggctgggtcaaatggtatttctagttctagatccctgaggaatcgccacactgacttgcacaagggttgaactagtttacagtcccaccaacagtgtgaaagtgttcctatttctccacatcctctccagcacctgttgtttcctgactttttaatgattgccattctaactggcgtgagagggtatctcattgtggttttgatttgcatttctctgatggccagtgatggtgagcattttttcatgtgtttttttggctgcataaatgtcttcttttgagaagtgtctgttcatgccaagtcaatcctaagccaaaagaacaaagctggaggcatcacactacctgacttcaaactatactacaaggctacagtaaccaaaacagcatggtactggtatcaaaacagagacatagatcaatggaacagaacagagccctcagaagtaacactgcatatctataactatctgatctttgacaaacctgagaaaaacaagcaatggggaaagcattccctatttgataaatggtgctgggaaaactggctagccatatgtagaaagctgaaactggatcccttccttacaccttatacaaaaattaattcaagatggattaaagacttaaacgttagacctaaaaccataaaaaccctagaagaaaacctaggcattaccattcaggacataggcatgggcaaggacttcatgtctaaaacaccaaaagcaatgacaacaaaagacaaaattgacaaatgggatctaattaaactaaagagcttctgcacagcaaaagaaactaccatcagtgtgaacaggcaacctacaaaatgggagaaaattttcgcaacctactcgtctgacaaagggctaatatccagaatctacaatgaactcaaacaaatttacaagaaaaaaacaaacaaccccatcaaaaagtgggtgaaggacatgaacagacaccttttgagactattttctagatgttgtaggcatgtttcattgttttcttttttcttttgtctcctctgaccattttaaatggtattaaatgtattttaaaatagcctatcttcaaggtcactaattgtttattctacttgatcaatctactattaaaaaactctgatgcattcttcagtatgtcagttgcatatttaactccagaatttctgcctgattatttttaattatttcaacctcttttttcagtttgtctgatataattatgcattccttgtctgagttctattgaatttctttgtgtttcctcaaaacagctattttgaattctttgtttgaaagataatatgtctttgtttctccaggattagtttctggtgccttatttagttcatttggtgatttcacattttcctggatggtgttgatgcttgtaaacatttgtctgtgtctgggcattgaagagttaggtattcattgtactgttcactatctgggcttgtttgtacctgtctttcttcggacagctttccaggtgttctaagggacttgagtgttgtgatctaagctgtattcacattaggaggcataccaaatccagtgacactgtgactcttgcagacttgtagaggtacttccttaatgatcttgggaaaaaaaccagaataattctctggattaccatcagaggctcttgttctcttcctttccttttccccaatcaaatggagtctctctctctggactgagctgcctggagctttggggtgaggtgacccaaacaccactgaggccaccaccactgggactgcactagggcagaccttaagccagcacagcactagggcttgtccaaggcccactgtaatcactacctggccactgcttatgtttgctcaaggcactgggactctacaaacagcaggtggcaaagccagccagccttgtatccttcccttcagggtggtgagttcttgcaggccccaggcatgtccaggggtactttccaggagccaagaactagagtcaaaaccttagaaatatacccagtgttctgttgtactgcaggtgatctggcactcaccacaagatgcagttcttcccactgtttcttcccctttctacaggcagaagagccctaccttgtggcaatcaacactgcaggcccacagggagtactgccaatgttctcttaaagcccaagggctcttctatcagcttgtggtgaatgttacctggcctgggactcaccacccttcagggcagtgggctcccctctggcccagggcaggtccagaaatgccatccaacagccaaggcccgggattgggtacactaaaagcccacttggtgctctactcccctgtgactaagctggtatttaaggttcgagacaaaattccctttacttttcccactgcttttctcaagcaggagtctctccctgtagccaccacagctgaggatgtgctgagtcacacctgaattcagcaagtctcaaagtctcacccaaggctcacagcataacctaggtatcactgcttgttattcagggcccaagggattttcagtcagcaggtcctgctaggactggatccttccctttaaggcagtagattgtctcctggttcagggtgtatctagaactgtcatctgtgagctagggcctgaaaaggggacctcttgactctgactggtgccctttcctactgtggctgagctgatatccaagatgtaagacaaagtctgctttactcttccctctcctcttctgaaacagatggaaggagtctcttttggagctatgagttttgcagcctggagttaggggaggggtggcaccaacattcccttagccaccctggctagtgtgtcagtaggttgtgtgcttcctaaatccactgactcttaacccagttcagcactaggactaacctaagaattgcagtccttgtggcctagactgcctttcaaggttattgagggccccagtgaacttttggcccacagtggcaaggcttgccagattcaatcctgactactgggatgggtggttcctctctggctaggtctggtttaaatagtccctctgtgagtgggcatcagctgggttcagcctggttttgctttctgctttgacagggcagctctgagttcaatgtaatgtctcacaattgctgcactctttctctcccaagtgcacagattctctttctgtgccatgcagccactgctgggggataggggagaggcggcattggcaattcaagactgtctttcctactctcttcagtacttctttcagctgtatgaagttaaaagcaagtactctgagtgctcccctgatttttggttcttatgaaggggctttttttttttttttcctgtgtagatagttgttaaatttggtgttcctatggcggggtaggatgggggtaattgttagagcattctgttctgccatcttgctctgtcctcaggccatttctttctttctgatcagttatgttaaactcttgaggttccaaaacacccaacaaatttcttcaatgatgtatgtttttgtttctttgagcccctagcctcagagttccctgatgtactcaatccggaggaattgcccctttactcatccttggccacccagtttcatgcccacatcttgaacattgttattcactcaaaactgaacctctgaatctctgaaatcttaaagttcaaaatcttactctttcaccataggttccttgtcctccagctttttctccgcttcatttttgctgaacctgttctttaacacattgaggcctccagtgtctttaactctctcttttctcccagtctgccatcttcctaacatcatctgctttttttttttttttatccagcctggatcccattgtctagtactttaatccattcttgtttccagtccccttgtttcatggaaactgaatccataccacttctctgctcttagatctaggctcctgggaatttttagaagaaaaaaaatgtcccacaactgtgtggatctgtgtcattaggaatttccagtgagctcacttaacatttccagccatgccactctactagatgtttacaaacaacatgccaccttgtcactctgagtctcataaagtgtatctgctgactgaaatgctcttatgcatctccccacctccacttttctttatctggctctctccactcaggctgcaggcctcatcttagaggtcacctcttctaggaagcttactccaaacctcctgcacacattgggtcaggcttcttcttgtctgccttctaccaacctctgattacctctacttgaactcatctcaacataatattgttagtctgtatatctactttcccttctaaattttaagctcctcaaggacaggtaccatatcttagtcatgtttatgtctctagtacttagaataatgtttatttaataaatgagcaaatatatcagtgagtgaatgagtgtgcaagaaattgaccttttccgtgtgcgtatgctggtcatgatatatgacactttatatgaaaagaagaaaaccacctctaggacactgaaaaatcatttcactcctactctctcccttgggcattttcattgcctattaggtagaatagctaaccttggatctcagtagtaaatgttagtcatatagccagttagtgatgaggctgaacaaaaaccaagtcctctgaaacctaggtcagttttgaaataataaggccgtgttgcttttttgttgttaattaaggtgaaatgtacatgaccaaatttaaaagaaaatctgtagataaagaaaacatagtcattttaattatataaagtaggctatattgacgtcacagcattagaaaaaagcataagttctcaatttcttctctaaaatcctgaaattcaaaaatttctgcaaacctaaaaattttgttgtattcattttgcgacaaacctggactgagattccttctagtcattatttaattcttagagtgaatattcatatatttgttgcagaaatgttactgtgtttgattatgagatgctaccccagaccccatgggaatgtcatgtagtattcaatatatcgtgtcatattacctttctaaatccaaaagaatctgcattctcaagcacatctggccccaaggtactgagaactgtgtagttgtttcagttattattttttttagactgtaggtaacaacatggcaacataaataggccatagataaatcatataaatatattttttgccttcattcaccatttcatttatgcccagagacatttttttgattaattgggaaagaatttgtttctttgccccacatttgtcttacctagtggagctcagtgtcaacccagtaatacagttttaggggagaaaagttagtattatttatcttcaaagtcataatttcaaaggcagacttatctttctctgggacccacatgctcagaaccttgtttttctgtacagctaagtagcacttacaaggtcctggtatcttcttctgcatgctacctagcttgagctgaggataggattatttatctgtcattacctcttcataatattgtgtgcaaatctttctttttttctgtctttggatttttctctttacctctgccatgaacattactattttttttggcttatgtttagttctttagaaagtaaaagccctataagcataaaaatcaacaaacatttccatttcctctgtgggatataaaaagtgataaggtaaggttccagtctgaaggaatttacaagctttgaggagagaatgagacaggttagtgtagtaggagagagattgtactttagatttaggtaggtctggatttgaatcctggttctactactgagtagtttggtgacctcggcaagttactttccgtcttggtgcctcagtttccccatatgaaaaatgggaatgatagaaatagtacctgcctcatcaagtcgttaatgaagattaaatgagatcatgcacgtgaagtgcttattatgcacataggaagtttatcatacctgctgctagccattattcacgaacactgcaaagtggtctaatggaaaaagcttgtactttagagtcaaacagacctacgtttaaattctagcatctccattactagttatctgtgaccttgggtgaattattttacctctttaagccccagattaatcatttgcaaaataggaaacacactatccaccttctagggtcgttatgaggatttaatgagaaagtatataaagcacttagtgaagttcttggcatgtggtagcctctcaagtgcccctttaccaactgtccacacaaatacaaggaggtacgagattgtatacccaatgacaacaggagtaagtgaaggtgctttgaaaattgtaaatgctaatacaatgtgagccattactgtgtagatttgaagttcataggaggaaggaatccctctaaactaggagtggaagagctggcttcctagacaagataatatctaaacttaccattaaagagtgggtaacattgatgtcagcacagggaagtgggagagcatttctgttacagatggtcacataatcaaaatgactgtatagagaataataatgatggttatgatgatcaatatgagcaagccaagtggaataatttctatcggatttattaaatctggtgagttaaaaatatcaggtgggaaagtatagttatctgggcaaatatttttttccttataaccctcccattgttattctatcactaatgagaaataaggtttcacttgaactttttatgttacagcgaaccggccgatgatttacaaaggcaggacaacagagttgtaacgggtttgaagaaacaaagaaggaagcgaaagaggaagtctgaaatgttacagaaagcagcaagaggacgtgaggaacatggtgacgagtagcaagagaccaaaggtaattgacaataggatataaagttgaagtgctcaatctctgattcttgttagctttatatttctaccatcatcttggcttgactgacacattttttttaaccacacaaatgtttggatcacaggagggccagcttctgaacacatatttatcactagagatattgagatggtaggaaaatggataagaaatgtgccaaattgttttgagtgccacattatatggtatacacaggtcagcttttcagagggagaaaagaagttgatcctgcccactctgactctatggctccctgatagacacccttggtaaataatgaaggccacagtcctcatatgtgaccacatcacatatccaggggaaggagaatggccttaggagtctgacagagatgagattgaatcctggatcttacctgttagtctcagctacctgttcttcaaacctgcacgatgtagtgttagaagaggttgagagagggatcccagaatcatacactagggactactttgtacaggttatacttgtacagggttatagatccctagccttgacttgggtctcctcctcccaaaataactgtgaagggacaagtaagaataaaatggttggtgagaaacaaagctgtatctcagggactgggagtaaggagacccaggtcattaactagtagtgtttccatgggcagtgaaattaacctttcagttccttgataccatcatagattttttgtgtaacttaaacaatataatgtatgtgaaaatgttttgaaaattgcaatgcagtacccaaaattatggtattaagttacagagaagcaaaggaatggaatgacaggccattgaattccgtgtcaggagactctggctttagtcccagttctgccattatttacagtgtttgcttgagcaagtcctttaactttcttgggcttcatttcaccaatcttcagaatgagaaggttgatttgatgaataggaaaagtgatttatctcagaagaaaaaaaagaaaatctttatataaggtatcatatatatatatgggatacatatttacttaaggtaacacataaatatgtattactataatgcctgtgtattattattcatataaatatattaccttgtattagtttaatgcaatacatgtgtgcatatgtacacatgtacacacacatatatacatatgtaacattataactagactaacaaaacttggtttctgtggaccattcactgagacatggaagttaactttgttattcagaaattatctctgtaatgatatttgctctaatctgttttatatgtatgcctcacagtaacagaagatgatgtactggcaaactgaaaatacataagttaatcataacattcactatatagaatttgataattttgttgcagggacttcttttatgacaaagtgcgatatgtgaataccagccttttcaagttgtttaaccctactttacttttctcccatagcattattttcccctcaagacaacagaaaccattcagagcagaggggactgtctcagccatgcaaacctcatggagcattttggaaagttaaaaattgattcttatttttgtcatgtttactttcaaacatgaaataaaattgagttctgttttcatgcatcaaaccagaatctgaattctttttattaaaaacagttcctacagaatctttaaaaacatgcctaaaacaccggtggcattcagatcctaaaaagttacatgatttttgcaacttgggttattgtatcaacatatacttctgttggtactaaataagacagatgttccatattgttattcacctgtcagcaagcagagagaaaaaccccaatgatcatatgttgcagtgtgtgatactttgtttattttgaggaaaagaggtgaagataatttgtagggtttttttattttataaattataatgttatttttcccactataaaagtaaaatacacttacaggaaatttggtaaagaagaatatataggataaaggaaaaaatcaaatcataatttcactagtgctaaatactgttaccttgttgtgttttcttttctttttaaataattgtgttctgtgatatatatgaatttattatgctgtttttaaaaattatgtcttatgattcacttttttcttttgaaatatgtgagactcaggtttacctgggcttgttactcattcatgtggcaaacatttattgagttcctgttatgtgccatgcactctgtgtgcttggagatagagtcatgagcaagacagacttggccctgtcttgatggaactcacagtatagctggagaggaagccaggtaaagaagtaatgacagggctatgataagaagagtaccaagttctgtggcagcacataacaggggcaccttgccccagactagtagtcgcttggagaatgagaagaactgaaaggggaggacactcaagtttctcaggattcagttatgatatgaatagattgcaattttgagggaagaagtcttggtttttggtgatcagaaaagaaaaaactcttattacaaaaactttagatagatccaaagctcgcagatataatgagaataaaagagttcctgtcaaacggaggttcataaagacaccatacctgggaaatgtgcacatctccatatgtgctctattgcaggaggcgtcatttgagccaacaaagcacaaagccccacaattgaaaatgcttgctgaaggtaagatccacaacatgtgcattgcaagatttatcaagacagcagtatgattaccttctgaagaagctgtcgagatgtttgatagacaccagacagaaggagacctgttgcagatacccttttgaatcaggagtccaaacttttcagtgcaactcacttggatgcaaatgaaaataatgcggtcatttattcatttcttcaacaatatgagctaggtactgtggtgctggggagacagaagcaaaaaaaaaatacaaaaatatctgcccttatagagtttacattctagtgaagtagccagaaaagaaacaaaatcaatcagtaaaatacatagtatgttagataacgtgtgctaaggaggaaaaaaataaagcaaggaaaagtactagggagtatgagggaagtatgtagttttacataaggtggtcagagtaggtctcactgagaatatggtatttgagtgagaatctcaggaaggaagggagagaaagctgtacagatatcattagggtgtgtatgtatgtgtattatatatatatgaacatatcatatatacacaaataaatgtattataagaaatgggctcacatgattatgtaggtggacaagtcccaagatctgcagggtgggtcagcaagctggagatccaagagagctgggtttagttctagtctgagttcaaaggcctgagaaccaggagagccaatggtatagtttccattcaaaagctggtgggcttgagactcaggaagagccagtgcctcagattgaaggtattttggcagggggaattctttcttactcaaaggaaggtcactcctttttgttctactcaggccttcaactgattggatgaggcccactcatgtgagggagcacaatctgctttacttagtctaccaatttaagtgttaatcatatcccaaaacaccctcactgacacacccagaataatatttgaccaaatatctggtcaccccatggcccagtcaagttgacacacaaaattaaccatcatagtctaaagtgcctaggacagtgtctgatgttcagcaaataaaatatctgtgtgtataattgaattagaaacaaaaatgacttgtggagttcttcgcttttgctatgatgaacaggcatctccaaggcaaagtgaaatcttagaaaggagtcatcatgtataccaaatgatcaccagagttcagtaaacaagtgtttgctttgaaagttatttcccaagaatctgatattgctgctctaaattttcagagctgtattcagcaaaaacaaaataaaaagagcaacaaaaaagtttgttgtgtagaaataaataataaaataacacataagaaaacaattcctttagaacaagcttgtccaacctgcagcccatgggctccacgtggcctaggacggctttgaatgctacccaacacaaatttgtaaactttcttaaaacgttacaagagttttttttgcaaatttttttaaagctcatcagctatctttagtgttagtgtattttatgtgtggcccaattcttcttcttccagtatggcccagggaagccaaaagattggacactcctgctttaaaacctaatattgaaattttagtgaagccatttgtaatctataaagaagataagcatagtctgaagtaatactttgaaagcaatagagaagaattatctgcaactattctttaacagattagaagttaggtttcagggtacacagacaaagattatcattaagttgtcaaagagtgtgagcttagagtgactgttgaacagttagtgctgtagaataaatgctggaccagagatgagaattgaggcaatcgaaggttgttattattaacgattaaatgccaaagggactcacaagagtgggaaggaaataaggttgttcagaatgctgtctccaacaccagtgcctaatgcagtaccaaatcatgtctgacatggatgtttaagccctgcaagtcatagatgggtagataataagtgtgtcactaatgtacaagcattaatggtcacagagtcatttccctcaagccatgaccatatctgttccaaatgaaaagatactagctaaatgagaagctctctgatgaagagcctgaatttaacttgactagggtgactgctttaagccagaggtgctagacaatctccttacttccacagacacagggactttaaaccaaggatcaccaagtggtcaaaaacaaagatctttcacttcagccctaggacaagcagacttcggtagagaatctggatacatgtaaagttcagtcacttggaaaatgtggacaagctctctcttggctattagcatcagcatcgtggacaatggaagctctataaaataagtggctctttagtgtaataaaggaatattttattcattatgacattttggaatgctttttgtatttatggtctaaatgatacacaaatttcccttgtggggactgggagaactgatactactacgggattgccagcctgaatttagagccccagtccaagctgtaatatgtgggcactccaggttagcggctgccctccccacatctcaggcaggggacttgccaagagaatttacctgtagatgagttataacttcaagggtgccaaactcaaatggaaaggtattcaggactagcaggactggctatttgacgtgtggggcctagtgcaaaatgaaaatatggggccctatttcaagatagcaacagcagagcattaaaccaagcatgggacccttctaagaacaagatgctatgtgactgcataagttgcatactcaggaagccagccttaagaaataggttagctcataggattgatgcagtgcttagcaagggatatcaaggtgtattgtgaataataaactctacttaaatatttcattggcttcaattttgcaggagtgcatatataaagcagaatgcactgtttatagtactatcaggacactatactcagcaattcattcattcattcattcattcattcattcaagaaatacttatagagcccttattttttgtcagttactgttctatgtaccagggatatagcagtgggcaaaatggacaaacatttttgctctcacgaactctacattttgcgtatgtgtttgctgtctaattgaggcttattttaatttcacgcattatagtctcttgcatagccaagcctggctatttgcatcatgaggacagaaccacaaagtcactgcccacttactggcaggatacagtaggtgaaggcagaataaataggcagaaatgactctttgaaatttaaaagttgagaatagtgttacgaatgcactgaaactatgacttgacaggtaagaggaagtatgaggggtagaactctaatgggtaggtccattgcttgctagtcaggattcctaaatccttctcatggcttgtacacactacttgagtgatgttggcccaaatgataagaaaaaaataatagttgcctgtcttctcctagaggaaagttctctgaaaataatcaagacagtatatgttgggttatgagatgctaattagttcataacattctctataattacgctaatcattcaacacaatttaacagcctcctactgtatgttagacactgtgttaaatactgggagagggtaaaaatgaatagccacaatcctccttaagaagcttgcaatataatgagggcagacatttgtcaacagtgccttagacttagaaacagatcactgctatgggaacagagaggagaggtgcctaacgttctttgtggtgggtagagcagggaaacattttccaaagttctaaggaattttgagcaaacaggaaagagagatgacatcggaaaggcaaagaatgtctgaatgtgctgtaagagcaaaggaaggcaattgacaaaatttttaaaggcctatgtttcctcttgcttgcaaagttcctttaaatcagcatactgggtcatattgaacagaagttgtcatatttggcaaatcaagttattatatatggctccctcccccacattccactccgccagtgccaaaagattgataggggagttaatggaacttggtgtcaaacagcaatgaaaagtctaaaagtctaacaacaaagtttttcaaagatctttgagcagggccagtatatgaagggaaatgtacaagatagggcctacgtatggtggagtggttagggtaaaggtttctttttgcaatctttactttcccctacttgttcttagggtcagaccccaaatttttcaggtgaattttactgaaatttcagaacaaataatcccaatcttatatatgttgttctacaaagtagaagaacagaaaaagctgctcatcatgtttatgaaactaatatgctgtagatatcacaaccagccaaagatagtgcaagaaaaaagtgatagaggccaatttaacttacagacatagatataaaaatcttccaagtctgtctatctatctatctacctatctgtaatctcacgatgtactaggtagaccttattttaggagttcaaggatgtttcactgctggaatgtgcaggagtataattacattaatggaacaaaggagaaaaattacatgattttctgaaaagttatagaagaaagcaatagatagatatcaatgatgatttcagatttaaagaactcagtacactagaaatggaagggaactcccctaaccttataaaagtaagccaaaataaaaatatttaatggagaaaatgtagaagcattccctttaaggtcaagagcaaggcagtgatgcttgttatcacagctactatttaacataatactggaagatctagccgaagaaattatataagagaaagaaatgacctctaaagtccaaatcagggattaggaagagaattaaaattgctagacccagcccctagagcctaaatgtggcctgaaacacataactgcttccccttacttaactgcattgggcaaagatggccaattacccgggttgcctaggatggaagagttatcctgtatgtggaacatttcatacgaaacctgagacagtcatcctagttctggctctgatttctttctttccttatgacccctggaaatttactttcctttcaagctaggctataccttaaagttggatggtttaggcattatattttattcagcattcctagatgtttttaagcagaaagtatatattcatatcagctcaatctgctcttttgccagaattctccttatttagcccttaataataatgaaatgtttaatggcatgggaaaatgctcatgtgtagagtgaaaaaagcagattataaaactctctatatagttggattccaattttgttggaaaaatgtatcacatattcatgtccttgaaattttttgatagctacctaaacttctgcaggtataattgacttcagtgtctttgtgggggaaaagttattgtggataggtggggaaaagaaatcttacaggaagagtagctggaaaaaggaaaggatggtggggtaggggaagaaaaatgatgcagattggaagaggtaacacagtgggaatgtttccgttataatgagagggtttgcattttaaatacttatgacccatagctcttttgcacattggagatagaaagttatcgaatgttattccttagagccctagatctagtcgtcattgtcttattgagcatgtaactaggtcattggaggaggcattttaaacaatcgcttactaagggatttttttttttaaatctaggcttcaataccaacaagaatagaataagttaattaaaatatatttgaatattaaatatccctagaaaggccctgatatagctcagattcttttacggcaataaagcaaactggtagttttgagcttaggctcaaaacagaggtttgacaagttgtcagagatttctttgcaatgaaaatgatacaactgttctcggagtttttaggtataggtcacaacaggaaaatcccatctgctgcggcacattccttaaatagctaaaaatagattaagtagagaggaggaggatgggtgtaactgtaaatgtttagcactagggagatccttgtggtgatggaatacagcaggtcctcgtataacattgtttcattcaacaatgtttcctcataacatccatgaggaaaaaaattgattttctgccaggaccactgtctgtgtggagtttacatgttcctcccatatctgcgtgggttttcgctaaatactccagtttcctcctacatccaaaagctgtgcaccttaggctcattggcctgtctacgttgtctgagtgagtgtggaggtgtgcgtgagtgtaccccgtgatggaatgctgtcctggccagggtaggttactgccttgcaccctgagctgcagggataggctctggccctccagaaccctaaactggaataagtaggatggaaaatgaatgaatgaatgagtacaaattatggtaaaataaaaatttgtaaagcctacggtaatcttacacatacatgacaatacatgaaatggtaagaaagtgatcagtgagcctgccatatatgttattgcttgtttctgaactgagtggtgggaggaggtgttcctaacaatgttcactttgcagacatttatttctttatttaatccattatcactatgaccactgtcattcagtgattcaccaaaaattgggtaaataattatcttgttttcattaatctttttaaaatgtagggatagcttgcattcatttcagtgtttaatattagaagtgtttgaggtctatatttaaaagtttggtgatgtttttgtgaccagaaatataccatagaaacttggctcttgtttatatcagttagcctgtggtcaaattggcttcattgtacataatttcactttaaagtcacagtttccaataactatcaacaacattaagtgaggacttactgtatttctgcatttggatttcagtgatggttacaaaaaatctacacatgtgatcaaatggaatagaactatatatacacacattgttccaatgccaatttccaagttttgatagtgcactgtagttatgtaagatgtaactattgggggaaattgggtgaagaatacaccagatccctctttttcatctttgcaacttctaatgaatctgtcgttatttctgttaacctaaataacaaacagagagaaacctctttaaaagaaaagatgtttatttgggaatagagtattgtaatgggaatactcatgtcatatttagggaagtaaaggaagacaaagctttttcaaggaaaaaatggggcgaattgtatatttgttttgaaataattatctttggctacaaagatcaataacaagggtgatacccgtccaaggttggacaggcagttgttgggcagatagtcctgtggaagtatttttatgtattcggttgtgatggccctggtgtaaggttgtgttttttgtagtattctgaaatttattttttgttattggtcatacaagcatgagaaccctctcttcatggcgtttcctgactctatttgttagggtgttcttaacattagtaactgcattttgattttgacaacttttgcattacaaaataaaatttttaaaaatatagaaacaacaataaaataagtcaaatagactagactctcccaggaaaagccaacatgaccctcttatgtcctgcctactctgtcttaattgggcaccaaagctgggagaagacgcttgggctggctgatgcctgtgtctcttgccaaataatgtgatagataagggaaagctaaatatagctttgtttactttcacttatataggccacagtgtcttgctgactttagagaaatgcccttccaaaacattattctacaactggtttatttggacagtccagtcaaatgaccagttgattcactgaagggggaaaaaaaatcacctaacgagttgaatgagcactcagaatatcaactccttcacccagtacagacagtcatgggatgcatgttcatgataaaacagctcccagaacagcttttaggtaatttaacttaggctttttaaaagtagagagtcatacttggaataagcattacaaataattagaactttggaaatgtgctaatttaactgtaaacactaagctgaaatgtcacaagaacatttagaactagaaaagaccagaactgttcctgtgttagtttcctaaggataatggcctccagctccatccatgttcctgcaaaggacatgatcttattcatttttatggtcgcatagtattccatggtgtatattcatcacattttctttaccacattttctaataccacatgttctaccttgtaagtgggagataaataatgagaaccaatgagcacaaagagggggaacaacagacgctggggcctacttgatgggggagtgtaacaggagggagtggagcaggaaaaataactattgggtactatgcttagtacctgggtgatgaaataatctgtataccaaacacccatgacatgacaaacctacacatgtacccctgaaccttaaataaaagttaagcaataaaaaagaccagaactcatctactctaatcactttatagtagcagaagtttatatctgagtgaaaactaaatttcagacatatctgggcatccgtttccgtaggttcattatattgggactggggccttggaggagtttgttttactttctggcccttgagggaagaatcttggtgatcaatgggtgagcagaatgcctattcctttgactggctccatagactaggcctgagtcctatggaaagaagagcattctttccatttctcctcagaacatagcatgtgttaaatgcagtgcggactgaatggaagctgcagattgggagcacaagaaggcagtgtttcaaaaacagtagcaatggcagtgacttttctggaagaaaagagaaaatgtgtctatttatttaataaatatttgtcgaggacttactatattccaggcactgttctgggtgcttgtgatacagcaatgctctcaaggagcttaaattctagtgatgggggtatggagagtaagaagagaagaaacaacaggcataatgaataaataaattatataatgcacttgaatgttgtaagtagtatggaaaaaagtaaaaatgcagaaggagaggggttcagagtggctctgaggagaggtacaggctgtactactgaatagttagaatagacttcattaagcagagaagatttgaaggacataaaggagttaacaaagctgacatctaagggaggtgcattccagcagaggagacagccagagcaaaagccccaaggtgggcatgtgcctgcaagtttgtggaatggcaaagaggcctgtgtgactgattgagagaggacaagggaaagagtattgggtaagtagttagaaagatgattgcaccggatgacatatagggccttgcaggccatggtgagtactgggatttgactctgcaggagatggcagccagttcagggttttgagcagaggaggggcagggcctggcttgtgtttgaatgcaatcactctggttgctgtgctgggaatagactgtaggatggcaagaagataaacagaatgccagtgatgagcctgttgcagcaatgtaggggctcacaccagagtgttagcaggtgagaggtggtgttaagaaggtcagatttggccaggtgtggtggctcacacctgtgatcccagcactttgagaagtcgaagtatgtggattgcctgagctcaggagtttgagaccagcctgggcatcatggtgaaacctcttctctacaaaaaatacaaaaattagccaggcatggtgatgcatgcctatagtcccagctacttgggaggctgaggtgggaggactgcttgagcctgggagattgaggctacagtgagccatgatcatggcactgcactccagcctgggtgacccagtgagaccctgtctcaaaaccaaaaacaaacaaaaaaaagtcaagtagaaggtcagattttggggaatgagttgaaggaagtgtgtataggatgtgtataggatctcctgacagattggatgtgaggtgtatgagaaaggaagtaatccagaaagcatgagaaggatggagttgttatcagtactgatatggggcagagcacaatagaagctggtttgaggaaccaggagttggccgtgttgaattggagatgagtattagacactgaagtgcagatgttgaatagttgctggatataagagtaaggaattcagagctagagatataaatttggggatcgtcagcaaaaagctgatatttaaagctgtgtagtagagcaaatgagatagttacagaagaggacccaaggacccaatcccaaaattgacgtagggaaagagaggaaagccagcaaaggagactgagagtgttgaatgaggtaggagggaaacacaaagtgtagggtgttttcgaagtcaagggaagaaaggggaagggtgtaatacaagctcaaatgctgctgctaagtcaggtgagagataagacttgaaggtaggtttatcaatatagaggtcattgtagaccttgattagggtagttgtgatagaatggtaggagtgaaagcttgattgtagtgattttaagaaagactagaggatgcctgggtgtgacagcttgcagttgtaatcccagtgctttgggaagtgaaggcaggagggtcacttgaggccaggagtttaagaccagcctgggcaacatagtgagaccgcatctctacacaaattaaaaaagaaaaattagccaggtatggtgggatgtgcctgtagtcctagctatttgagaagttgatcatgacactgcactctaacctaggctaaagagtgagattctgtctcaaaaagaaagaaagaaagaaagaaagaaagaaagaaagaaagaaagaaagaaagacagactagaggaattggagacagcagagataggaactcttttgagaatttttgcctcaaacaggaatgaacaaatcaaacaataattggtgggaggagtgaggtcaagggaaatgcgtattttctaaggtaatgtattccataatttaaaaaggagattgtttccacctttgaagtttatcgacaaatgcccaattgatgcagatttgttgaattaagatatgatgtgtcaaatgtaaaaagagggtgtagagcagtgattttcaaagtaagatccccataacagcaagagcagtatcaactgggcgtacttgagaaatgtaaattctaggaggccacatcccaaacctaccaagtcagaaattctgtggttcaacaagcccttcaggtgattctgatgtacattaaattttgagagctcctggcgtagaacactgttatcaggtgagtttacttccaaatcattaacatgaatgaatgaagaatgtttattttttcattaagagcagaaggtatgttttttttttcctgtccttgcccaaccacctattgttcagatgtctccatcctaaggaaaatcccccccgcccccgcactccccaactcagaaataacagcatatttatatgttggtggaaatgatccagtagagagtaaaacattagtgatataggagaaagagtgtaaaaatgttggagtcatgtacttcaataggtgagagaggaaggatcaaatacataggtgacattagataggagcaagtagagcctcacatatggtgataagcaagatggcagagagcataggcacaaaggcggtggcaataggagtctgaagtttcttattgcttcagttttctcagttaagtaggaatcaaagtcattagctgagagtgagaatggaggagttttgacaagcttggcaactcattctgtgggcaatactctatgaaaatagtcactcaaacattgctagtgggagtgtgaaattatagcgactcctttggagagagattttgcagtatttttatcttttgacacagcaatctcacttctggtattttaaccagaagatccccctccacaaacaagaaacaacgtatgtaccgaggttatttactgcagcattgtttgtaacggaaaacaatattggaaataacctatatgatcatttatagaggactggctaatgatgcatcattaggttgtttattctgagtttttcttctttttttgatgtaggtgcttattgctataaattctcctcttagtaaagctatcactatataccataggttttggtatgttgttgtgtttccattttcatttgtttgaagacattttttaatttcctttttaatctcttcattgacccactggccattcaggttcatattgcttaatttccatgtgtttatgtagtttccaaaattcctcttattattgatctctagttttataccattgtagttagagacaatgcttgatattatctcaatatttttaatttttaatacttgttttgtggctactatatggtctatctttgggaatgatccatgtactgagaataatgtgtattctgcagccatatgatgaaatgttctattctgtaaatatctgttaggttcatttgttctatagtggagattaagtctgatgtttctttgttgattttctatctggaaggtctgtccagtgctgacagttgggtgttaaattacacagctatttttgtattggggtctatttctctagctctaataatatttgctttatatatctgtgtgttccagtgttggatgcatatctgtttaaagttattacatcctcttgatgaattcactcctttgtcactatatagtgacctaatttgtctctccttatagttttcctcttgaactctattttgtctaagtacagtgactcctacttttttttggtttccattagcatgaaatatctttttccatccctttatttgcagtctatctgtgtctttataggtgaagtgtgttacatttaggcaaccgatcattgggtcttgctttttaatcccttcagccattctatgtcttttgattggagagtttagtccatttacattcaatgtcattattgttaagtaatgacattctcctgccattttcttactcgttttctggttgttttgtagtcttttttttttttttttctttcctgccttcctctcttccttttagtgaaggtgattttctctgggatatattttaatttcttcctttttaatttcgtgtatctgttgtatgttttaagatttgaggttaccatgaggcttgcaaataatatggcccatattttaaactgataataacacttattacataaattaaaaaaaatcaactagcgataagaagactaataaaatctccacactttaacttcattcctccaatttttactttttgttgtttctatttctatcttaccatactgcctaagtcttgaaaagttgttttagttactagttttgattggaccatcttttggtgtttctactcaaactacgagtaatttatacaccataatttcaatgttatacttgtctgtttttctgtgcactattaccagtgaggttttctttttgtctgtttgtttgtttgttttttgagatggagttttgctcttgttgcccaggctggagtgcaatggtgtgatttcggctcactgcaacctccgcctcccaagttcaagcaattctcctgcctcaccctcccaagtggctgggattataggcatgcgccaccatgcccggctaattttgtatttttagtagtgacggggtttcgccatgtttgccaggatggtttcgaacccctgacctcaggtgatccacccgccttggcctcccaaagtgctgggattacaggcgtgagccatggcgccaggcgcagatgttttcttatagttcattagcatcctgttctttcagattgaagaactccccctagcatttcttgcaggacaggtcttgtgttgaaatccctcagcttttgtttgtctgggaaagtctttatttctccttcatgtttgaaggatattttgtctggaaatgctaatctaggataaaagtttttttttttttcttcagcactttaagtatgtcatgccactctttcctggcctgtaagctttctaccaagaagtctgctcccagacatatcagagctccattgtatgttatttgtttcttttctcttgctgcttttaggattctttctttcttttttttctttttttcttttttttttttttgagatggagtcttgctctgtcacccaggctggagtgcagtggcgtgatctcggcttactgcaagctccgcctcctgggttcacgccattctcctgcctcagcctccccagcagctgggactacgggcgccggccatcacgcccggctagttttttttgtatttttagtagagacagggtgacctcgtgatccgcccgcctcagcctcccaaagtgctgggaatacaggcgtgagccacagcgcctggccaaggattctttctttatccttgacctttgggagtttgattaataaatgtcttgaggtagtcttatttgtgttcaatgtgcttgatgttctatagacttgtttttgtacttgaatattggtatctttctctaggtttgggacattctctgtttctatctctttgaataaactttctactcctatttctctctctaccttctatttaaggtcactatctcttagatttgccctttgaggctagtttgtagatctcgtaggcatgcttcattcttttctttttttttctttcatctcctctgagtgcagattttcaaatagcctgtcttcaagctcactctttctttcttctgctttatcaattctgctgttaggagactttgatgcattcttcagtatgtcacttgccttgttcagctccggaatttctgctttatttatttatttatttatttatttattttttgagacagggtctcactttgtcactcacgctgtactgcagtggtgtgatcttggctcactgcaacttctgcctcctgggttcaagcaattcttgtgcctcagcctcccgagtagctggaattacaggcatgtgccaccgcacccagctaatttttgtatttttagtggagataggattttgccatgttggccagactggccttgaactcctggcctcaaagtgatctgcctgcttcggccttccaaagcactaggattacaggcatgaaccactgcaccaggcctgcttgattcttttttaatttcaatatctttgttaaatgtatctgataggagtctgaattccttctctgtgttatcttgcatttccttgagctacctcaaaacagctattttgaattctgtcttaaaggtcacatatctctgtttctttgggattagtcactggcgccttattcagttggtgaagttatgtttttttggatggtgttgatgcttgtggatgtttatcagtatgtgggcatcaaagagttaggtatttattgtaattttcacagtctgggcttgtttgtatccttcctgggatctttccaggtatttgaaggagcttgagtgttgtgatctaagtctttggttactgtggccatatctgctttgagggttccccaagcccagtaatgctgtggctctttaagactcgtaaagttaccgcctttgtggtcttaggtaagatctgggagaatccaggcagagactcttgtcttcttcccttacattccctgaaacagagtccctctctctctctgtgatgagctgccaggagctggaggaagggtgacacaagtacccctgtgaccaccatgactaagactgtactgagtcagacctggagccagtacagcactgggtcttacacaaggcctgcagtcaccactgcctgactactgcttatgttcactcaaggcccaaggactctacaatcagcagatggtagagccagccaggtttgtgtccttcccttaaggatggtgaattctctctggctctgggtaggtccagtgatgctgtccagtagccagggcctggagttggaaaccttagaattctacctggtgctctgttttattatggctgagctggtacccatgccatgagacaaaatccttctcactctaccctcacctttcctcaagcagaggagactctccccatggccaccactgcttaggcccacagtaagtgctgcctggctaccacagatgttcaactaaagaccaaggattcttctgtcagcttgcagtgaatgctgccagtcttgagtctcttcagcattgtagattctcctttgtcccagggcaggtccaggaatgccatctatggtccaaggcctggaaacagggatcctaagtgcctgtttggtgctctaccccactgtggccaagctggtacccaagctgaaaaacaaagtcccctttactcttccctctcctttcctaaagcagaaggagtctctccccatagccaccatagctgggaatatgttgggtcacacctgaagccagcacaactctgaatctcacccaaggcctacagtgagtgctgactggctaccactgctgattattctgggctcaagggctctttagtcaacaggtgatgatttctgctaggactgagtctttccctttaaggcaacagtttcccttctggcccagggtgtgtttagaaatggcatctgggagctagggcctcaagaatcttcctcggttccctattctactatggctaagctggtatacaacttgcaagataacatcctctttgctttccactcttctctcctcaagcccagggaaggagtctctcccagagctgcaagttgtgctgcctggtgttgagggagagggtgatgcaagcactcccttggccactccagcttgtctcactatgttgtgtgccccctagcccactggctcctagctcggcagagcaccaggacttgcccaggagttgctgtccttgtggcctagactgcctttcaagtttatttaagatcctatagccctttagcatacagtggtggggcttgctggaacttaggttccaaccactgggctggataatttgcctttgtctaaggttggtctaaatgctccctctatgggcaccggctgaattctgccccatgttgctttccactctgacagggcagcactgaattccaatgcatagtcccacaaccactgtgctctccctccatcaagtgcgtggattctctctccatgtgccgtgtgaccactgccggggaagggggaggggttgtgtaggcgattggggactgtctttcctaccctcttcagtgcctctttctttaatatgatgttataataaaaccaggtactgtgatttcttaatttttggttcttgtgaaggtgtatttttgtgtagatagctgttcaattttgtattcctgtgtggggaacaattgtgggaggcttctattcagccatcttgctctacttccccctccaactgaggtttcatataaatttgaatatcagcttattaattttcacaacaaccttgtgactttttgggggagagattttattgactccacaaatgaagttgggaggaaatgatatattaacaaaatcaagattccagcctatgaacatgtatattcatgttcataagcatattcctatatttaaatcggtttttaaaaaatttctcagaaatatcttatggtttttagtgtaaagaccttacacatctttttaaagatttatttctaggtatttgcctatttttggaagatattgtagttttaaaaatttgtacttactctcatgatctagataaatgaaattgatttttatattttgaactcataccaacctccttaaaacagctattaattcaaaacttttgtagatacttttggatttttttcacttctaatccttatacctttccctcctttcttccttgacttattatgctgattaggatctctagtatgacatcaaatagaagtgttgctaacagatatcttatcttgttcctgatctcaggggaaatttttaagataatttaacaataattatgatgtttgctgtaggatttttgtagctgctattttttcagattgaggaagttcccttgtcttctaagtttgctaagaggctttcttttttttttttcaaatcacaactgaaagtagaattttattaaatatcttttctgcatctagtgaggtgatcatatgattttctgtccttttttcctgttaatatagtaaattataagttaaatgaattaattttccataagcttcatgtggttgtgatatattagcattgttaaatatcactaagttagatttacacacacacacacacacacattattaatgtgatttttatttcttggaatgtcctttacaagttttggttttggtggcttcataaaacaagatgagaagtgttccatgttttctctctctttttttttttttggaagtattcgtgtaagattaatgttatttactctccaagtgttggaaacactttgtcagtgaagccatttaagcctggagttttactttgtggtgaggtttttaataacaggtttcagttctttcatagatctaggactatttatttttgtttcaattttattgagttgtgtttcttaaagaatttgtccactttctctaaggctgcttctaccctaactcccttgctcttcttttcttaggtcccccaactacacttatattagtctttcccactattatatatatatatatcttacaaccttttcagcaatatcaatgctttttacttctacacttcattctagatactatctagtgcactaattccattttcaactttgcccaatctgctgttaaatccatctgttgagctcttaattttagctattttatttcctgttccagacttccatttggctttttattgtagattccaattctgtggaacctgttcatcacaattattttaaagtcttggtctgataactccaatattacctgtttctgtttctagcctctctctttttctcttgctcctatttatttgtatgtcagtaatttttactgaatagatcaagaacgtgaaggattagaccctcctcctccctgcctatttctgacccaagagatgaggcctaaactgagattgaagagaagatttgaattcagaatgagattgaagttttgatttaaactctgaaaagctttaatacctgaaaagaagattgttttaaaaaatgaaagtgcttatgtttctcttattgtttcttcagagtttaaaagaatacaactctttgtcatataaaaaatggttttgactgaatgcccaacattgtgtatgaaacatatagagactccagatcatgttatcttccttcagaggatattgccttttcctctgtcaggcagcagagaattagataaatgtaattcaacttggggctttgctaactgaaagctaatttgcggtctttgtatgtcccagtttgcttctggtttactcccacttctagggcgtagctctctaggagttccaactaagaatcagggttgtttgttggaactcctcctacttataaggtcatgaactccaatttttcaccctcgaacattgtgagcctgcttgcttgctctactttgttgatgctttctgattggcttcttaccctaattttctgcacagtttaaactgtaaatgcctctagaagaacactggttccaagcgctaggttctattctctgtcccttctatctctctgagagcttggtctctcaacacctagctgcattgtccactgaacacttttaatctccccagccccaagaggtgacctaaaactgctctgctaaattctttatctcattctccatgccaaaaacatcaaggaggaaaataagtgtccatgaagtaagctcaccttaatgagctcccttctttctggatctagtttctcaagtcctggctaccttagtagccttcttatttcttctcaaaaaatgtttataaaaacctgccttttctactttttcttgttaaaatattcatctctactacaagctactcaatcatagaagacctctgaactcatgattaaaatacgtgcatgcgtgtgtgtgtgtgtgtgtgtgtgtgtgagtgtgtgtgtatgtatttctatctctgttcattgattgactggatataggagtaatgaccctgtagtagcatacatacctaacaccaagatatttgtttctatgcatcatttcttacttaaactaatcaggtttctttggagaaactactgatttcagtgaaagtacaagcacaatgtgagcctagatatagatatcttgctataccagtgatatggtttggctatgtccccacccaaatctcatcttgaattgtagctcccataatccccacatgttgtgagagggacccagtgggaggcaaatgaatcatggagaagggttttttttccctgctgttctcatggtagtgaataagacttacaagatctgatggttgtataaagggcggttctcctgcacatgctctcttgcctgctgccatgtaagacatacctttgctcctcctttgccttccaccatgattgtgaggccacaccagccatgtggcacttgagtccattaaacctcttttttctttataaattacccagtctcgggtatttcttcatatcagtatgaaaatggattaatacaaccagaaagtaagaaagtgatcagagaatgatggggacatttcataaggacacaggaagcaacttgaagggacacccactggccaagtctgggataatttaaacataaaaaaaatttggtaatagtttatagtacattgagttaagaaaaaaaaatccataaattcatggtaatattcaaagtaaaataaaaggagaggagaaaaaagaattcccagtgtgttttttttaaaacagaagaatgccagctactaaatgtagaaggaataaaataattagaaaagcaatactttttaacacccaaagtaataattggctcaggtaaggatcatcagaggatgctaatatgactgggtaaaatgttgaaaataagtctcaaaatatcactctacagactacttttaaagagaaaaaatgtgctttctcaatggaaaagtctggtggtcatcactttaaccaagtggtcaagcttggcaatgccaatagtggttttgcttgatgatgtgccttcagtatgatcaagaggaaggtacacaacgtcatttatgtgatgttcttgctggaaatgtttgatctaactatcatagcgaggaaagaggcaattctagaatgtgaggtatgatggaggacatcctacctggactctttaaagagacactcaaatgctctgagtgaatcttgagtggatcttggattggaaaaacagaagctataaaggatattttggaggataatcgaaggaattttagtgaagactggatgctggatgatattgaattcatggtgactttcttaggtgtgttggtattgtggttataggaatcagtttattcttggaaaatacatcctgaaatattttgcagtgaagtgtcatgatgaaagcaacctacttttgtatgatttggaaaaaaaggatgtgtgggtatgggtgtgtatttagataaatagagtggatgtatccagatgttaacagttggcaaacataggtgagaggtatgcaggtcttgaaaattagaagaaaaaactcttgtagcgttttattttttcaacgaaaatccacaagatggcagtagaggaacaccctcagaatgggtttcttgggggcctcttataaggtgacattttctgatttgaaaagcaggatgagagatccaacaaaggattgttttggctttgtgaatacatttacatgtaatgttatacaaaggtatgaagacaaaatgccgtttggttgtatcattctatgaattgctttcatcgaaataaataccattttgttaaatttggtccataaactcctgaaatgtgtccaaaatgttatgtgtatgagcattctccttttatgatgagaatatctacagtttctactatgtctcaaaggggtcaattattgctccccaaacttagaagcttgaggggttcaagaaagtggcactagatcaatgccttaatcacatcagaactggtagtagtttaagccatttctctttaatatgtgctttgaaagtgagtttagtgaagtgctctggcagtgcttatttgttaaatggattgatgtaggaactagtggatgtggatggataggagtcagaagacctgggtgtgaatgtagcacttatgccatcctcttccccaacatctttccccaaacacacacaccaagttaaaactgtagccagcaagatgtttgtggtcacataaaacaattctcccccaaacaaaatcagttgtttgcctgtatttcatttttttactccccaaacagaaacagcttattggtcagtggagatgcctgcaatataaaattttctctttataaacatttgtgaaaagagttcatatttttagggcaacatgagccaagcttgtaattgcgggaagcttctagtcttctgtgagtgtcagcttgcctcttgttcccaccttcaacccctgccaccccaagagttttggtttggatcaggactaggtttctataaactgcaacgtgagctgctaggtgatcacagtaagagccaagccacataatgctcttctttcgattcattgggcagatagttgtcttagaaacttacatgatgacttgattgtaaaataaaatccctgttgagcaacttgatctggctatttgggtggaatggatttttttaaaagtgtaaactaagggaaaataaaatactcatttaaaatgtgttggcagcgtgtagttggcttaaaatgtcatttactgagttgttaccatttttgctctctcaattttattagtattaaaaattcattattgagggaccatgagctacatgcaattagtaatgtgactgaaagtgagagactaaatagtaagatggtcatgtctttagaaataaacttttaacttctctttactgcattccccatggaaataccatgttgtgccatgttgttccttaaaagagcttacgttcagtagagaactggtgaaataaataatgacacattcatatattgagattgtatgtaactgttgaaaataatgacatagattcatatatattgacatggaaagatatccaagctgaactgtaggagaaacagagcaagttgcagagctatatgtaaagcagaatactattttggagtatacatttgctattatatgttcagaaaataagatatgggagatcatataaaaatttgcttaaagcgatttatttatgttgtggggaaaggagtagtattgtagtacaagggaacttatgttttgtgtttcatatgtttttctgttgtctggatttttaaaaatgagaatgtagtctgaataaataatgatataaagggagtgtatgttggcactatcctttgagaccttcatgtgctaaatataattgtgcagtatgatcagttctgtcattcatcttgaatagacaacagctaaagagagccagctggttaacttataagttatatcccttccacattcaaagatgtttacaatattaatagactgaaatgaaacaataaaaaacaaatgtataaactaaaaaagacaaattatttagaacgaatgagataactctttagaaggaatgagataacaggacctggaatatggaatgacttctctacagaatatagcaaaaagtttacctctgagctttctggtatccaaggggaaaaggaaaatatgttggctctatatatttcttccaaagtaagaatgctacaaagaaattaatcatacggcatcacatatgtgacactgacatattggacaatgttttaaaaacaattttgcttataatttatttcactgatttattttacatatatgaaatagaaaaatgatattccaaagaattatgcctctcaaattttggaggaaattattttttagaaataaaaaattaaattcaaattgcacaaataaaagataagtttaagctctgcttaaaagtaaatttcagagacgttcttcgccgagagtcgtcgaggtttcctgcttcaactgtgcttggacggaacccggcgctcgtcccccaccccggccggccacccatagccagccctccgtcaccttttcaccgcgccctcggactgccccaaggtccccgccgccgctccagggccgcgcagccaccgccgccgcctctccttagtcgccgccttgacgaccgcgtccacctcgcaggtgcgccagaactaccaccaggactcagaggcggccatcaaccgccagatcaacctggagctctacgcctcctacgtttacctgtccatgtcttactactttgaccacgatgatgtggctttgaagaactttgccaaatactttcttcaccaatctcatgaggagagggaacatgctgaggaactgatgaagctgcagaaccaatgaggtggccgaatcttccttcaggatatcaagaaaccagactgtgatgactgggagcgggctgaatgagatggagtgtgcattacatttggaaaaaaatgtgaatcagtcaccactggaactgcacaaactggccactgacaaaaatgacccccatttgtgtgacttcattgagacacattacctgaatgagcaggtgaaagccatcaaagaattgggtgaccacgtgaccaacttgcacaagatgggagcgcccgaatctggcttggcggaatatctcttcgacaagcacaccccggggagacagtgacaatgaaaggtaagcctcaggctaatttccccatagccgtgggttgacttccctggtcaccaaggcagtgcatgcatgttggggtttcctttaccttttctataaattgtaccaaaacatccacttaagttctttgatttgtaccattcctgcaaataaagaaatttggtacccccccccaaaaaaaagtaaatttcaatagaagattgttgttttccttgaataagaagctgaaattgtggagtgaagtttttatttggtttaatttttatgggggtttttattttttaatttttattttagattcagggggtacgtatgcaagtttgttaactgagtatattgtgtgatgccgaggtttggagtatatgaatgatcccatcacccaagtactgagcataatacccaacagtttttcaacctatcccctccctcctccctccctccctccctgcctcttctagtagttcctagtttctattgttgctatctttaggacaatggttttttaattatatttttagaaaagacacagagacctttgattgaatattttcactatctaccctctataaaaatgcagtcaaaacatcaaatcacaactcactcactgaaaacatctttttgggaaaactgagggaatataatccaggtacgtattttcctgaaaatccaaacaaatttttttcaaacctggctgcacaacagaatcaactggggagtttttaaaaatttactgtctgtaatccaccatgaatcttcagagattctcattccaaaggtctggcatggatcttgggaaactagctattgatgctctgcacatgttctgatgcaaatcctggttcgagaaccactgatctgtgatacataataggcatagcatgccttcctctagcatatgttttatttgaaggcaaataagttaaaacatttttgtatgaaaacaaacaggtgaattatggaacagaattctaattttgcattggttgctgaaataaaatatgagctttagacatttgatgcactcaagggctcacttagggctatattcccagactctgtggaggtagagtttatgattcactgctataaaattgttttggtggaaaggttttttaaagcaccaagggaattgtatcagttagggttcagtgcttataaaatccttggaaaggttagaagattggaggttgggaaacacaccaccataactgtcacctagaggctaagaagctaccactcaagaacttctgccatcaatgctgttacttccactacttctcccccacagagctcaaagctgactagtaaatttgaccaacagtggccaaagcagtaggaagatggcattttcctccctcccacacttcaaatcttgtgcaagtgcatctcgttggacaaatggaattcacatccagaattttggttgcaagagaggctgggaaatagagtttttagttttttttttttacccctgtgaaataggaaggtgcatggaagagggtgctgaggatgctgagggtcaaacaatgttgtcaagcacaatcatgaatcaaaagtgctaaaaagtttgatataattggctagggaggacactgagattcacaaagcatggagataatgccatctccttgtaaagctgagtgaaatactccttccatacagcctaaaatggaaatttacattttatctattttgtagaagttattctatagatggctctgtcttgaaagatgacattcattattggcagtgacatttcagccaaattccttcaactgagtttgtgaatcgcattttttctaaattaataaattgcttatgaaaaatagcttctttcagtgtatacgcaactgaatctgaattatatgtgaaatgttatcctattcattttgcttggggtgtgcatgtgcatgtgtgtttgtgtgtgtgtgtgtgtgtgtgtgtatttgtgcatgtggacactttctggagggctttattaagctaggatataaactggttatttccctgattgtccacacataggtcattcaagactaactttaacctgacaatgattctattggcctggagtcagaaggggtgcttctctgagggaatcacagtaataatagttacttattgagtacctgttctctgcctaactttgtgctaaatgctttacaggtagtgtttctcttatccttatgacaattacttgaagtatgtattactattcccattttgtaggtgaggacatatgcacaaagaggtcaaatatctttctgagttgacagagcttgtaagtgatataatcggaatttgaatgcaggtgtttgatgccaaaggttccactaacttaggtgacattgaagagaacctcaggagatttcttgtggaactgctgaagcctcttttccactttactgttatcaccttagcccctgtattttggctaaatgtatgaccatacttagtagggtaactgagtttaagaggagaagagagcatttttaacacaagctgagatacccgcaaatgcagacagaagaaaaactgggtcgttgaatcagctgttccagagcagacataagacgataaccctctcatcttccctcctttcaaagctattcagcagtattaaattgtggagtgggattatagtacataacataaatccctataatgctttgagtttagatagtgaaaaaaatagtaatgtgggagaaaaaaacatgcgtttgtccactgccttgtgtgaactagttctgagttacataggaaacttctctcagaaaggattgaattatgggaattttttgcctgtaactggactgatggcaacagaattgaaatgatttctgcttattctttaacttattacccccaattgcatcattccagttttacgtgtgggactggatcatatacagtaaaagtacatgggaagggaatactttccatccagtataaaatggccaactcaataataaactaagcacagtagcttttatcacacagacatttggcacagtgtttatcaaacaaggcaccattaatattttgggagggactgtttttcattgtgcagggctgtctcagagaaattgtttagggtctctgccttcagggcactaagtgtcaatagcctaactccatcttctggagaagcaggataggtgagggctctgcctcatccatggcatgactgaataggaaatgctgcttccctgtgggcatttctttagggaaactgcctgaaacacagacaagtaatttgctcaaagtgggataaccagatgaaaatacaggatgcttggttaaattttaatttcagataaacaatgaggaattgttttgtatatgtccctagatttttactgggtgtcctggatttttatttgctaaatctggcaagtaatcaggcaaccttagcccaaagtcaattggcagattcatgactcaataagtggtagatccatgacttgaagccaggtctgtttagtctgacgtcagaccctgagtgctttctactgttctgtactggtttctacacttgagcaactttcatgcacaaaaataatgccctggaagatacaaagataaagtataatccgtgctttcaaattatttggcttttccaggacaagaaaagagaatttgggaagaaatgcgtattaacactatcttcttgagggcctactatatgatgaaagttgaatcaatttatattctaggaaaattttaaaagtttaaacaaggaacatatgttatgccttcctctgagagtcttgttaaaacattcaggttgttttatagggtgatatatctgtaaaggaagcaccatgagaggctctcccttgatgtgacttcctattcttatttctcctttggttcaagaggtagctgattaggaagctcaaccaaggtcagaacttaagttaattaatggctttcatatattgagcatggtggccctaaagataagaatacagctcagatcctagtaggtttcttgagctaatgaagtctttactaaaaattctcaggactctcaaaactgaaaaaagcacttttaaacattaacacgttcatcttcctatttgtctttattaatgagattgtgtatataaaagtgctttgcaaactgtaaaagatatttaattgaaataactgtgaaataatattttgtgatctgtgttttaaacatgaataaacagacatcagaaagcttagagttacaggggagtaaacaaatatgtagatggtatcatcctgcatgtataatttgcaagttgccttatttacctgacattgtttttgagatttatttgtgttgatacatttagatctaaccaatttattttaacttctctatggtattctatgatatgaataaaccacagtgttatttatcaattcctctactgatggacaattagattatattcactgtccattttgctattgcaaatggtacaacagtgcatagtactgtaatgcacatatgtgtcttcttgtgaacatgtgtaaaaattttcctaggatagatacctggaagtgggcagtttgatattagttatgcaaattaaaaattaccctgtatgatattgtatattgtttatgaaacatacatacagagaaaagaataagaacattcattgaggccaggcacagtggctcactcctgtaatcctagcacttttggagctcaggagtttgagaccagcctggacaatatgccaaaacctcatttctacaaaaagtacaaaaattagccagacatggtggcatgtacctgtagtcccagctagttgggaggctgaggtgggcagatctcttgagcccgggaggtcgaggctgcaataagccatgattgcaccactgcacttcagcctgggtgacacagtaagaccctatctcaaaaaaataaaacctagaaaagaccatttattgaaatgatacacagcaacttcagcagagtggttattctaaggagggaaaggcaagaaaaagatgggaggggtttggagctttagctctaacattttatttctattccattttactttatttttttttcaaaaagctattcccctttatttatttattttattcatcctcctccctctaacctcctcttcctggcctctggtaaccaataatctactgtttgccttcataatatttacttttttttagttcccacatatgagtgagaaaatgaaatatttgtctttctgtgcctggtttatttcacttaaaatgtccaccagttccattcatgttgctgcaaatgacaggatttcattctttttttataaccaaatagtattccattgtgtatagataccacattttctttatccactcatccattgatggatacttaagttgattccatatctttgctattgtgagcagttctataatgaagatggagcttagatatctctttgatatactaactacatttatttgggggatatacccagcagtgggattgctggaccatgtggcagttctgtttttaagtttttttcaggaatgtccatactgttttccatagtggtgtactaatttacattcccaccaacagcatatgagggtttcccctttcttcaaatcctcaccatcatctgttattctttgttttgtaataaaagccattttaactgggatgagataatatctcattatggttttgatttgcattattctgatgattagcgatgttgagaattttttatatacctgtttgctatttgtatgtcttcttttgattaatgtctattcagatcttttgcccattttttaatcatattatttgtttccctgctattgagttgagtttctcatatattctggttattaatcccttgccaaatgtatagtttgcaaacattttctcccattcagtgggctatctcttcactttgttgattgtttcctttgttgtgcagaagatttttagcttaaagtgatcccatttgcctatttttacttttgttaccgtgcttttgaggtcttacacaaaaactttgcccagcccaatgtccagaagtgctttcccaatgtttctttctagtggtttcacagtttgaggtcttagattggagtcattaatacattttgaattgatgtttgtatatggtgagagctagaggtctactttcattcttctacacatgattattcaaattttccaacaccatttattgaagacactgtcctttcttcattgtaggttcttggcacctttataaaaaaatgagttggctgtaaatgcatagatttatatctgggttctttactctgttctgttggtttatatgtctgtttttctggcagtaccatgctgttttgcctactatagctttgtaatatattttcaagtcaggtggtgtgatgtttccagctctgctttttttggtcaggaatgctttacctatttggggtcttttgtagttacatatacatcttagaattgtttactctctttctgtgaaaaatgtcctggtattttgataaagattgcattgtatctgtaaattgctttgggtagtgtattagtctgttctcatgctgctaataaagacataccccagactgggtaatttataacctccacctcaattgaaccttgagacaaggttcaattcttgtcttctgcatacctgtaggaccaacaccatgtagaagctgctaaggcttggagtttgcaccttctgaagcaacagcccgagctctaccttggccccatttagccatggctggagctgctgagacacagggcaccaagtcccaagactgcacatagcaggcaggccctggatccagcccacaaaatcatttttttttcctcctaggccttcaggcctgtgataggaggagctgccatgaaggtctctgacatgccctggagacattttccccattgtcttggtgattgacatctggctcctcgttacttatgcaaatttctgcagctgtcttgaatttctctccagaaaatgggttattcttttctatcacattgtcaggctgcaaattttccaaacttttatgctctgtcacctcttgaatgctttgctgcttagtaatttcttctaccagatgccctaaattatctctctcaagttcgaagttccacaaatctctagggtagtggcaaaatgccatgccaccaatctgtttgctaaaacacaacaagtgtcacctttattgcagttcccaacaagttcctcatctccatctgagaccatctcaacctggacttcattgtccatatcactatcagcattttggtcaaagtcattcaacaagtctctaggaagttccaaactttcccacatcttcctgtcctcttccggcccctccaaactgttccaagctctgcctgttacccagttccaaagtcagttccacattttcaggtatctttacagcaccccacttcccagtaccaatttaatgtattagtctgttctcacactgctaataaagacatacccgaggctgggtaatttataaagggaagaggtttaatggattcacagttccacatggctggggagaccgcacaatcatggtggaaggaaaaggagagcagagctgcatcttacatgggagcaggcaaaagagcttgagcaggggaactcccatttttcttttttctttttctttttcttttcgttttttttttttttttttaagatggagtctcactttgtctccaaggctggagggcagtggcacaatctcggctcactgcatctctgcctcccaggttccagcgattctcctgcctcagcctcccgagtagttgggactataggcacatgccaccacacctggctagtttttttatttttagtagagatagggtttccccatgttggctaggctggtctcaaactcctgacctcaagtgatccaccaacctcggcctcccaaagtgctgggattacagatgtgaaccatcgcacccggccggaactcccatttttaaaaccatcagatcttgtgagacttattcaccaccacaagaacagtatgggtgaaaacaccctcatgattcaattatccacacttggccccgcccttgacagatccggattattacatttcaggttgagatttgggtggggacatccaaaccatatcaggtagttttgtcattttaacaatattaattcttccaacccatgagtatggaatgtatttctatttttttgtctgccctcatcagtttctttaatcagagttttatagtttccttgcaaacatctttcacttctttagttaaattgattcctaggcattttatattctttttggctattgtaaatgggattgttttcttgatttctttttcaacttgtttgctgttggcatatataaatgctactgattttgtatgtcaattttatatcctacaactttgctaaattcatttatcaattcttacagtttttgttggagtctttaagttttcacaaatcatttcatctgcaaacaaggataatttagatttttcttttccaatttgtatgccctttatttctttctcttgctgaattgctctggctaggatttccaatactatgatgaataaaagtgatgaaagtgggcatcattatcttccagatcttaggggaaaggccttcaattttttcccattcagtaaaatgttaactgtgggtttatcatatgtgccatttattatgttgtggtatgttccttctatacccagtttttttttaatttttaatttttgtgaatatatagtaggtgtatatatttatggggtatatttaatattttgatataagcatacaatgtgtaatcatcagggtgaagtatccatcacctcaagcatttatcattcattttacaaacgatctaattatactcttttcgttgttgaaaaatgtacaattaagttattattgactatagttaccctcctgtgctatcaaatactagatctcatttattctttctatgtttttgtacccattaaccagcctccttccctccatgacccccctaactatccttcccacctctggtaaccatcattctactctctgtctccatgagttcaattgttttaatttgtattattttttaatttttaatttttgtgggtacatagtaggtgtatatatcgagggaatacatgaaacgctttgatacaggcatatgatgtgaaataatcacatcatagagaatggggttgccatcccctcaagcatttattctttgtgttacagacaatccaattacacattttaagttattttaaagtctacaattaagttatttttgactatagtcaccctgttctgctatcaaatagtaggtcttattctttctatttttctgtacccattaactatccccacctcctcctcaggaccccactaccattcccatcttctgataaccagcctcctactcgtcatctccatgagttcaattgctttcaatttgcaagaaataagtgagaatatgcaaagtttgtctttctgtgcttggcttatttaagttaacacagtgacctctggttgcatccatgtcattgcaaataagagaatctcattattttctatggctgaatagtagtccattgtgtgtatgtaccatattttatttattaatttgtctgttgatggacacttgggttgctcccaagtgaatattgctattgtgaatacacatgggattgcagatatctcttcgatatactgatttccttttttttgggtaaatacccagcagtggaatttctggatcatatagtagttctacttttagtttttcaggaacctccaaactgttctccatagtggttgtactaatttacacttccaccaacaatgtatgagggttcccttttctgcacattttcgccagcattcgttattacctgtcttttggataaaagccattctaattgtagtgtgattatgttatttcagtgttttcttttaacacttttatagtcagaggtcttggatttaagtcattaatccactttgatttgatttttgcatggtgagggacaggagtctagttccattcttctatatacagatatccagttttcctagcgccatttactgacgagactgtccttttcccattgtatgttcttggcacctttgctgaaaatgagttcgctgtagatgtatggatttatttcggggttctctattgtatgccattggtctctgtgtctgttttcattgtagtatcatactgttttggttattatgactctgtagtatagtttgaagtcaggcaatgtggttcttccagtttcgttccttatgctcaggatagctttggctgttctgggtcttttgtgattccatataaattttaggattttttttcctaattctgtgaagaatgtcatttgtattttaatagggattgcattgaatctgcagattgctttggatagtatgaacattttaacaatatcgattcttccaatccataaacatggcctatctttccatttcgtgtgtgtgtcctcttcaatttcttttatcagttttttatagttttccttgtagaggtcattcagttctttggttaactcataagtatttaattttatttgttgctattgcaaatgggcttacttttaaattttttttcagattgtctgctgttggcatacagaaatgctactgattttcgtatgttgattttgtatcctgcaactttacttaatttgtttatcagttccaataatttttgatagagtcttaaggtatttccaaatatgagatcatatcatctgcaaagaggaataatttgacttctccttttccagttcagggagacctttctttgtcttgtctgattgatctagttatgacttccagtactagtgaataactatggtgaaatagacatccttgtcatggtcccaatcttagaggaaaggctttcagtttttccccattcactatgatactagctttgggtctgtcatatatggcttttatcatattgaggtatgttctttctatacccagttttttgagggtttttaccataaagggatattgaattttatccaatgctttttcagcatcagttgaaatgatcctatggtttttgtccttcattctgttgatatgatgtatcacattggttaatttgcctatgttgaatcatctttgtatccctggagtaaatcccacttggtcataatgaatgacctttctatcgtgttgttgaattctatttgctttaattctgttgaagatttttgcatcaatgttcatcagggatagtggcctatacttctctttttgtgatgtgtgtttgtctggttttggtggtagggccatactgacctcatagaatgagtttataagtattcctttcttgtctatttttcagaattgtttgagtagggataatatcagttcttctttaaatgtttggtaatattcagcagggaaaccattgagtccaaggcttttctttgctgggagacttttttaaatggctttaatctcattactgttattggtctgttcagattttggatttcttcatgattcaatcttggtaggttgtgcctaggaacttatctatttcttctaggttttcctattcattggcatagcatcacttatagtaacttctaatgagcctttgaatttctgtggtgtaggttgtaataactacttattcatttctgattttatttattttgatcttctctcttgttttcttactaatagtctggcagaagctttgtcaaatttagtttttcaagaaacaactttttgttttgttgatcgtttatatttttttcatttcaatttcatcgatttctactctgatatttaatttttctttacttctgctaagtttgtgtttagtttgctcttggttttcttgagatgcaccattaggttgtttattttgagtttttctttttttgatgtagacacttatagctattaaattccttcttagtactgctttcactgaatcccatatgttgtggtatggtgtatttccattatgatttgtttcaagaaacttttcaatttcctttttaatctattcattgacccactggttattcaggagcatattgtttaatttccatgtgtttgtataatttccaaaattctttttgttattgatttctagttttattttggtcattgtggtcagagaagattcttgatatgatttaaattttttgaatgctttaagacttattttctggcctatcatatggtctatacttgagaatgatccttgtgctgaggagaagaacattgggtcttgttttatgatccattctgccactctatttcttttgattggggagtttagttaatataaatttaatgttatcattgatacataatgacttactcctgctattttgttacttgttttctgatggttttgtcatcttctcttccttctttccttttctcttgtctaatgaaggtgactttctctaagaatatattttaatttcttgctttttatttttgtgattctgttgtatggttctagatttgaggttaccatgaggcttgtaaataatatcttataactcattattttaaactgataacaacttaatacttattgcataaattaaaaaatctaacaagcaaataaacaaaaaactaataaaataactacacgttaacttcttccccctactcgttattggtttatagaggtttaccatttcttcaaggtttaatctttgtaggtggtatgtatctaagaatttatccaattcttctaggttttccaatttgttggcatatagttggttataatattctcatgattttttgtatctgaggtctcagttatgtcttcgttttttgtatctgaatttatttatttgggtcttccctcttgtatttaatcttagctaaaggtttggcaatttcgtttatctgttcaaaaaaccaaattttcattttgtcagtcttctgtgtttttttttttttttgtctcaatttcatttatttcttctccaatctttattatttctttccttctactaattttgggattgttctgttcttggatttctagttccttgaggtgctttgttaggtcatttatttgaagttttccttcttttttgatttaggtattattgctataaatatttctcttagtactgcttttaatgtatttaattgattccggtatgttgcatttccatttttgtttgttcaagaaatttttaattttcctttttagtttcttcattgatcctttcattgctttggagcttgttctttaagttctgtatgtttgcatagtttctgagattcttctttttatcaatttctaatttaattctattatagtcagaaaagatacttcatattatttctatgttttaaaatttgttgagacttttttttggctcaagattgttctatgttctgatgaaagaatgtgtgttctgcagcagtttggtgaaatgttctgtaaatgtcagttatgcttatttgacttagtgtgtagcttaattctgatatttctttgttgattttctgtctgaataaactgtttgctactgagagtggagttttgaagtatcctataattattgtttggcagtctgtctctccctttagatctattcatgtttgctttagatacttgagtactctaatgtcaagtgtgtaaatatttataattgttatatatccccttgttaaatttacttgtttatatagtgattttctttgtctctttttgtagtctttcacttttggcttattttatctggtataagtctagcttctcctgctctgttttggtttcaagttgcatgaaatatccttttccaccccttcactttgaatttacgtgtgtctttatagacaaagtgggttttttgtaggcaatatcaagttttgtcttgtttctttatctattcagccattctatggcttttcattggagaattgagaccatttatattcagtgttactattgataagtatagactttgtactgtcattttgttgcttatttcctggttattttgagactcctctcttcttttctatctttaatactgtctttccttgtggttaaatgattttctctggtagtatgctttaatttgttgctttttatttttactgaatctgttattggtttttccactgtgtttaccatgaggcttacaaaaaaacatcctttagatataacaaattattttaaagagatgacagcttagatcataaagaaaagaatggaaacaaataatcaaacaaacaaaaaacccgttacacttttaactccatctcccttcccatttagacttttagttgactccatttgtgtatttttatattgcctatctcttaacaggctgttgtgcttataattgttattgtttttgacagatttgcccattgagcttcataatagttataagtacattgcacatcacaattacagttttagattattctggggttgtctgtgtatccgtgtgttatatatttattttatatatcgatttaaatatttattttaccagtgtgttttataccttcatattttttttttctgcatgttagtgggtttttttcttttagattgaagtactcactttagcatttccagtaagacaggtctggtggtggtaaattctctgtttttatctgggaatgactttatctctccttcatatttcaagtatagacttgctggatacagtattcttggatggcaggacttttttctttctctcagcactttaaaaatgttgtttcattcccacctggcctgtatggtttccactgagaagtttgttcccagacagtttggaacttcttcatacgttatttgcttcttttctcttgctgctttcaggatcttcttttagtccttgacttttgtgagttttattattaaattcctttgggtagtcttatttgggtcaaatctgtttggtattctctgaacttcctgctcctgggtatttatatctttctcaagttttagaacattttctgttgttttttctttgattaagatttttagccattgttcttgcttagctcccacttaaacaccaataatttagattttgtcttttcaggtaattttctctgtgggttttctttgttttcttttttttaaatttctcccctcattgtatattttaaaattgtctatcattgagctcactaattctttcctttacttcgtccattctgttgtttagagcctctaattaattttcagttcagcaaatgtgtttctaagttcccagatttccatttttttaaactaattttaatctctttgttaaattttctgaaaaacttgtgaatttcttttttgtcttcccttagagattactgatattccttataattattctttttaattcttgatcagggagttcacatatcatcatctccttaggatcagtcactggttcctttgactggtttggagaaataatggttccttttgctgttgtttcctgagaatgtatgtctatgtctttctgttggaggattatttatttatttactcatttatttatttattatactttaagttctagggtacatgtgcacaacgtgcaggtttgttacatatgtatacatgtgccatgttggtgtgctgcacccattaactcgtcatttacattaggtatatctcctaatgctatcctcccccctctccccaccccatggcaggccctggtgtgtgatgttccccttcctgtgtccaagtgttctcattgttcagttccctcctatgagtgagaacatgcggtgtttggttttctgtccttgcgatagttggttctgaatgatggtttccagcttcatccatgtccctaaaaaggacatgaactcattctttttttatggctgcatagtattccatggtatatatgtgccacattttcttaatccagtctgtcattgatgggcatttgggttggtggtgctggagaggatgtggagaaataggaacacttttacactgttggtgggactgtaaactagttcaaccattgtggaagacagtgtggcaattcctcaaggatctagaactagaaataccatttgacccagccatcccattactgggtatatacccaaaggattataaatcatgctgctataaagacacatgcacacttatgtttattgcggcactattcacaataggattagttttttattctgtattctttgtatagctagttttgattaggtatgtttgcttagagagtctttgtattttacctgttgattttcttcttcttcttttttttttttttttgatggagtctcgctccgtcaccaggctggagtgcagtggtgcgatcctggctcactgcaacctccacttcccaggtacaagtgattctcctgcctcagcctcccaagtagctgggactacagacacacgccaccacgcccacctaatttttgtatttttagtagagacggggttgcactgtgttgcccaggctggtctcgaacgcctgagctcaggcaatctacctgccttggcctcccaaaatactgggatcataggcgtcagccactgcacccggctgatattctttttatttattttccactaggtcactgcctcctttttctcactagacggtaccttgatttcagatttgcctcagcattagtgaataatcagatgcctgcctgtcctgaaatgggggaggtccctaagggagtatcctggcagtgtgggaagcctagctagggatatgtgaccaggaaacctgtggattgaacctccacaacatgatgctgctgaatagcatctttggtttagtgtcgcctttggccaagttatcaagaagagtttccagggctggggatggtagtctcaccttcccctttgtctttggctctcttcagagatatgtctcctttcaggcactcaagatgtttcttgtgggttgaagtagagacaagtgtcttgccagggaaccaaagatggtggggaagctggttgtctaccttgatcttactttcccctgcattgaaacggtgagtcagaggaaaatttttcacatgcttggtgatgagtagattggagtgaggagcatgacagatatggaagtcctattctctactgtttgcttgaagatgtttcacttctctgtggtcctgggaactgtctcaatcttatatctaagttctcgggtattgctgatgacaaccttggcactgtatacttgcttttggttttctgtcggggaagggggaactgaaacaagcttgcttctacactactattttgaaatagaaagtcctgtaacattttatttctttaataaaaaagagaaagttcagaagcacacatggcaagatgttaacatctgttacatatgggtggcgaatacataggtgatattattttctatatgatatagatatttcatagacaataacaaaaatactgttatataactaaaaaggtatattgaaggaattcaggacaccagccccagtatctgacctctcgttttcactcagataaaagttgaagagtgtaggattcccctttcctttaaaccagctcagagtcacttcctgtagtaccacctccctctatggaccaacaagaggggacatgcttgttcacaccaaagcaaaatgtagcctaaacatccataaaaccccccaaaacaatgagcaaagacttcctaaataaacctctattcgatcacatttcattctctctgatggaaatgagggcccagtccaagatcttatgagtaatttaaaatggaggcatgatatttctaaagctaaaaatgctgaagttatttattggtggtttcttggtaattgtagtgacaaatcacatgagggagctataggcaaagggaattaaaagagagtgctggggaaagatattttgccctggagaagtatacaagagttgtctgaaaagcctatctaactacctctcttaggccatttgctgtttgagcaaggacaaatgctctcttgcatctttacggctgatctgaaaacagaagggcaacaggaatctcctatgaattcccaatccaaaactcaagccaatgcaaaacaatagtgaggtaggaaccaaatcctaaattttgagaaaaggcattttcctctgtaattaaatctagggagatttcactatttggtattactggtcaagagttgtaggatgcattactgaattctgaagcataggtatttgattaacaaatgtaataatgttaaaagacaagaatagaaatctgaaggctctataagtaggcaacaaatatcgcattttgtgcctaatcagaaggtttttcaatattattcattacttaataatttccaagtattattcaataattaattaattattgtaatttagtaaactggtgagcagtttattgtggtttgctgaccagagcctaatcaatgcagaagccattttactttagataaaaccacactcacatggaaattttctgctttatatttattgccatgtaaatcaccccccattgcatttcacaaatcagattaatatattgatattaataacagaagttaaatttaaaaaggatcccatccagtcttccaaactaattaaccagcaaagatttaaataggagctctgcatttccgtgtccctagaacccacacacaacagagggctttgtcctggttacaaatctgaccacatgggagaaatttgctaaagtggcttttgtacatgcagtggcatcattgggtctggccactgctgtgtttctttgccaacaactgcaactgaacacttgccaccttccctgctgctattgaggctcaggattagatgtggggaggccagcatccctcacaacttcatctcttggcacggcaggcaggaggcaagcagcatggcagaaagagaaaaaatctttgaaatcatcaatgtgaaggccctgactcaaattggcaagtatgaaggggagggaagtaaatagaactctaagtcaaagggccaatgctggctcctcagagagagaaagagagagccctttgggagcaggttgggttgggagtcactctctcccgatagggagcatatgggaagcagacaagattttgttactttaacataaagtttcttaacttggacgctatgggcattttaggccagatactttttgctttgggggacctatcctgtgcattgtaggatgtttagtagcatccttggaccttacccaccagaaaacaaatagcacacccgtccccctgttaggacaacaaaaatgtctgtagacattgccaagtgtctactgaggagaataatcaccctggttgagaagcatagcacacagtgacccttttagcaggttgcattttggattttgctgcaccaagtgtgactttatcacctgctattcgttgaattgtgacttctcctaaaatatattgaagtcctaacaaccattacctcagaatgtgaccttatttcaaaataatgtatttgcaaatgtaataagttaagatgaggtcatattggtataaggtggggccctaattcaatatgactggtgtcctgaatgccatgtgaagacaaaggcagagattgtagtgaacaccaaggattgcctgaaacaccagaagttaagagaaaggcacagtaggagaaactgccctgccagcaccttgattttggacttggagcttccagaactgtaagacaatacgtttctgttgtttaaactgccgagtttgtggtactttgttatggcggccctagaaagtgaatatatcctccctgctaaagtgacctgttaacagttactttgcagagagacatttttagaaccagtacacgaagctccaggcagggatttagccttcaggagcagtccatcggaggcctgctaggtctccaccagctaagtcaggttattcacctgttttttaattcagttagaccctgaaatgaggttgaggactgctttgaaagacctcaggttaaaggtaaatggaaaacacaaccaaaccgctatgatacatccattactgtccttcatccctcccctggatcttctttgattctttcacttaaaaacaagactcggggcagtggagaaaacatcccatgttaagctatgagaaactaaaaacccatccactcttccatacttatttgtcaaacagtggcaaagttagttaggatcttgagctcctggcacatcttctttctttcacctgctttcctcagaaatgcagctcacagcaaaaactatggttccctttcctccacatcttcgccaacatttgttatttcttgccgttttgatattagctatcctaatgtatgtgaggtggtgtcttattgtggttttgattttcatttttctgatgattagttatgttgagcatcttttcatgcaccgtacaatgtagccatttgtatatcttctttggaaaaatatctattcatgttctttgcccattttaatctcactactgaatctatttcccaaagaaatgaaatcaatatgttgaagaaatatctgtactccgtatgtttattgcggcactattcaaaatagcaaagacttggaactaacccaaatgtccaccaatgatagactggattaagaaaatgtggcacatatacaccgtggaatactatgcatccataaaaatggatgagttcatgtactttgtagggacatggataagctggaaaccatcattctcagcaaactatcgcaagaacaaaaaaccaaacaccgcatgttctcactcataggagggaattgaacaatgagaacacttggacacaggaaggggaacatcacacaccggggcctgttgtggggtgggggaaggggggagggaaagcgttaggagatatacctaatgtaaatgacgagttaatgggtgcagcacaccaacatggcacatgtatacatatgtaacaaacctgcaggttgtgcacatgtaccctagaacttaaagtataataacaaaaaaagaaatatttgtacttccacgttcattgcagcactattcacaatagccaagaaatggaaacaaggtgtccactgacagatgaacggataaagaaaatgtgacgcacacacacgcacacacacacacgcacaaacccaaaacggaatattattcaacctttaaaaagaaggaaatcctgccatttgtaagaatgtggaagaatctggaggacattatgttaagtgaaataagcctgacagaaagacaaatacaacatgatctcacttatatgtggaatcaaaaaagttgaaatcatggaaacagagtagaatggtggttaccaggcccaggggttggagaaatggggagatgttggtcaaagggtataaacatcagttctaagatgaataatttctacagacctgatgtacagcctagcaagtatagttaataatactgcattgtatactttaatttgctaagagaataaatcttaatagttctcaccacgaaaaatagtaactatgtgaggtgatgaatatgttaatcagcttgattgtgttaatcatttcacaacatgtatttatattaacagcacattttacatgttaagtatatacaatcttatttgtcaattttgtctcaaagctgaaacaaatttttaataaagacaaatgaaacaaaagaagaaaaataagtttggggactttggtatgttcagagctcccttagcccttggcttcaacgtctccccaggtctctctagaggttggaggtctctgcagctttgagtgccaagtccagggaaggcaggcagaggaaaagggaagaagtgggaggcattggacccttggagctgacaaatgttccctgtccccacccagcctgtggcccaagtcctgccgctttcttaatttaacccttagtctgccttggcagggcctgctgggcacatagccaaattttgctatttcaaagtggaatagaaatggtggtggaagaaattatgtggatgaaaagctttacgtttttccataaaaattggggagtgtgaacacctaacagctatcatttcatatgtccttttgatgtgccaggtgcttcatagacttacctcacagaatcctggcaactatccttgggagatggagatttattagacctgttttcaggagatgtaactgagcctcaaagaggtaaaggagttttcctgaagttttcacaactataaggaacagaagccaatttgagtctaaatttttccctgttatcacactgctcctctccagtgagcccttgcctctcctacaaggcctggatgtctccacggtgtggtaggtgtggtatgggaagcctacagtacctggatgtggaaggcagaacaatacccccaccaaagacgtccacatcctaattcccagaacctaaaaacatgttgccttacatggtataaggagttgaattgtgtcctccaaaaagatatgttggtgtctaaccccaggtaccctagaaagtgaacttatttggtaataggattattgcagatatagttacgttcagatgaggttataatggagtaaagtgagccttaatccaatatgactggtcttttgataagaagagagaaatttggacacagggacatttagagagaaggccatgtgagtatggaggcagagattgaaatactgcagcttcaagccaagaaacacctgtgactatcagaaactggaaaaggcaaggaaggatcctcccctagaacctttggagggagcacagtaatactgataccttggttttggagtcctagccttcagaagcataagagaataaatttctgttgttttaagtctcccagtttgtggtactttttaatggcagccttaggaaactaaaacacgtggcaaaagggactttggtaatatgattaatggtataaaccttgagacagagagattaaccaagtttatcagggtggtcccaatgtaatcacaagggtcctcataagagggagaccagagggtcagagccagagaaatttgaagatgctattctgctggctttgaaaataaaggaaggggctgtgagccaaagactatgggtggcctttagaggctaacaaaagcaagaaaatggattcttctctatagcctccagaaagaacacagccttgtcaacaccttgattttacccactgagaaccatttggactcctgactccagagctgtaagctaataaatttgtattgccataagctattaaatctgtggaaatttgttacagcagccataagcaatgaatacacttgaaaacctggcagcctcacctatgaatagcatccagcatccagctgctctcttggacactaaggttagaatgaggacctgcactatttcactcacttgcctctgggtatatactatcaaaaagaatcaaatatgtttccaaatcagatgtttcttcagacactgatattaatatcaaaaaatgtgagaaaagaaaggacagtacaagatgattgaaaataaatgtgtcattgttagtaaaacctaatatgtgtaaagagctttacattttacaaaatacttacttttttgagacagggtcttgttcttttgccaaggctggagtacagtggggtgatcatagctcattgcagcctcctgggctcaagctatcctcctgcctcagccttctgagtagctaggactataggaggatatcacaatgcccagataatttttttttttatttttgtagacatgggggtcttgctctgtttcctaggctggtcttgaactcttggcctcaagcaatccttcctccagcaatccttcctcctcagcctcccaaagtgctgggattccaggcatgggcccctgcacctggctttaaaatactttcttgtttgattacatttcatttcattttcataagggcacaaagagaaaggacagcgatcgatctcacggatgagaaaactgagtttctgagagggttaaattacattttcaaagtcacaaaggtattaagtggcagagctgtgtcttgaaaacagaggttctgattctaagtagaagcctgtcctactaattcatgccttttcacagcaatatagtaatgtttgttttaaaaatgagtgtatactaaatacaaatgttatagcccataaaactcagttgtacaagttacttcactgttgctataactgaagttagctttttttttcttcagtcctgaatctgctggatggcacaaagtgtactcttggtcattttcaggtcacaaaagtgatttaaggtcttggctcacatcagaatcctcccccattctcttccatgtactgtcccctcagttatacagggtttataaaactttatggtatggggaaaaggaggatgatgacagcctctgctgcagtgtataccatccactatggttgctgttcactctcacctccatggagcatcctctgagacagttgtattcccacctggcctcatgctatgtgggccatattactttatccagccttgttcccccctcacaaccacgtgactcttttgggcctaccagctcatactttcaggagtaaggggaaatcttcctgctgtctctttctcccacactatttggggctgtctcagagtccaattttgtccctgacatctccagcagttatctgcactgtttccataatatggtggtgcaaggaactcctgtcagaatcaccttactgtcattatttcttccttgtattcacaagctgaaatacaagaggagaacattcacatgtttctcttctctacatctcttcagtaacggtcctaacctgaaggcagtgcgtatggaatgctctagctcttttggtttgaggtacaagattgtgttggtgtgggaaaacatcaatgaataattcaaaatattctcccaccaagtcatcttaactcaattatcaattatgtggaagtgcattagagtttggaaaattttgccatgactgcatgtgaaaaaaatacgaatctcagaataactaagtaggttatgtttcactcacataatttaatgactgtcacatcttagagaagttacttaatttcacttagcctcagttgctgtctataaaatgggaattaggatcagatccagttttgtggggtccaaaatttataccatttgggggaccctctagaacaaaattacagaagcagaattaggtataagaaggaatctgtgcttaactaacacccagctaatccaactctggggccataacaacctctgaataccagcctcagaattggtgaggagctcagaggtaatggatgtgagagtgttttgtaaactgtgaagtgatacggctacagaattggaaccaactttacaatggtcaatttgatgtgctttatagacattcttggtttaagtaactgcatgtaagaaaatttaggctaggtgtggtggctcaagcctataatcccagcattttgggaggccaaggcgggcggatcacgaggtcaggagatcgagaccatcctggttaacatggtgaaaccccgtctctactaaaaatacaaaaaaaaattagccagacgtggtggtgggtgcctgtagtcccagctactcaggaggctgaggcaggagaatggtgtgaacctgggagggggagcttgcagtgagccgagatcgtgccactgcactccagtctgggcgacagagtgagactccgtctcaaaaaaaaaaaaataaaataaaatttaaattatctcttttctaaggaacattccatgtttttcttgaaaattataatttgaatgtaaaaaaaaaaggaaaccagttaaaatgaggcctttgagctaaaggcttaaaagagattgagctgaatctaagcaaaattagactattgtgaaataggtatagtgaaaagaaaaacaagcaggtttgggaaggtggcaatgcgttttctctgtgtaatgaacccagcattgtttcagaattggaatatgatgaaatgagcctggaattgatggatgggataattgagttaaaatctatctttaccctaactcactgtgtcacttggagttggtgtcttatctgatcagggtctcatttttttacatgaaaatgaaatgatgatagtagatagtccccaatgttatttcttcattttttttgtaaaataaaagcaagtttattaacaaagtaaaggaataaaagaatgactactccataagcagagcagccacttcttcattgttgtaaaaaaatataaagattacttgaatagttgtggtgtaaatcataatttctaattataaataatttaaggatacaacaaagtacaaaaagaaagttagaaaatgtccttaaaagttcaatatttcaaaataaccacgtgaatatgagatgaacatcatctcaaatggctctcctaaacattgaaggatgaagatacagatacatagaaaccccttataaaatgggctcataccctacatgctgtttttaagcaaaaactgtacttaactttatttgtattttacataaaagagaaaaactgaaatgaaactatcttaattctgacaataggtacaggggaaaatatctcgtgagaatttttaatctggtagctcctttgggttttcaggtcgaattcactccagatgtgtggtctaaaaaatttcaagcagataattttatttaatgtgcctccaatttggtagcactccaaggcaaatggtagaaccaaatacaaatcctctatggagaataaagtgtcaatgaattcccatagataaagctacaacctaaatgagcagctcacagtaaacaaacaaacatgaagcaacaacaaaaaaaacaagaaaatcataaaacacacaaggaaagaatgcactgtaaacaaagaccaagagaagaaaaagaaacaatagaaacaacccctaaagggtttaaacactgatattaacatactgtgtttaatgtttaaggtaataaaattgaagattgaaactaagaggagggaatagcagatttttaaaagaattatatgtaatttatagacatcaacatataataattgaaattcaaaactcaatgacagtactagttagcagattaaatgcagctgaaaaatgaattcatgtattggaaaatataccagaagaaattatccagcacatagttcaaaaagacagagatgggaaatataaaagcaagcacaagagacatggaagattgagtgataggtctaatgtcattgatgcgtctgttgaagataacagaggaaaagcaacattaaagaagtaattgctgacaattttccaaaattactcaaagaaaccaatcctcagatccaggaagtcaaagtgaatccaaagtagaaaaaataaatcttcatctagaggtactgtagtgaacccaaagaatatctgtgttcaagaaacaagatacctcagaagcagtcagagaaaaaagacagattaccaaaaaaaaaaaaaagaaggaatagcaatgatgaatgacatttaaacagcaacaattgaagtgagaagacagtggagtaatatctccagtagactgagagaaaacaattgtcagcctagattgtacacacaacaaaaatatttctcaaagtgaggcaattaaagatatttccagataaataaaaattgggtatctattaccaaaaacaaaaaaaaaaaccactaatggaaattttcaatgctacacttcagataagagaaaaaggattccagctaaaatgaaacataaaaatgtgagtgaagatatcggttaatatgtgtgtaaatctgaagagacacaaatgataaaaaacaataaaaacaatttctaatttatgaagttaaaaatagtccagaaataaaatactggacaatgatatcatttagcattttgaactagtgtgagcccttgacccctgtgctttctggacttaatagtccaaatagaggaatatctgaactgctgaactgcagtttggaactactgtctgttgctgtgtgttgaaacgatagaaaatagggaggactcatgcgaccagctgccctttgaaccctgggcatggctttaagctgagctgggcagttatgcttatgttgcagctagtctagcacttcatcctcattgttctataactaaagctaaatggaagaatggatattgggttagaaacctagaactctctcccacagctgtatacttacatcaagttgtagctgggaaggatgaggctcagagaggtcacaaggctgatggctgacagtgaaggggcaagagtttggttttactgactctgagtttagtattctttctccaggtccatgtaatctctttgttgttacagcagttgttttccattcataactctttgcaacaagggtgtttagttagaggatagcatttggatctgatgtcaggcacctgtctgtggattgctgggttatttgtccttggtctataggcacctgaaggaggattaactcaggatctctgagcagattaggcagtatgagattccaacttcatgactttcaatccactatgaggggagcctctagtgaactgcgaagtagtttcctttctcccaggagtcacttccaacactagctctcagaggtctcaggcccttgtctgactagggctcatctgaccttggagtaatccaagactgttgttgattaattttcaatagaaaatccttttaagtttatgtgtctttgtggatgtaggtcacttatttggtgtaacactaaagcagggtagccttgaaatttttaataagagagttgacatttttcagagaggagagcgagaaactagttggggccttaggcaatcaaaataacagtgagaatatggtggttgtagcaatagtttctgctggcttgaggccagaaagctgaccacagaacttagaaataggccacatgtggatttatcttcagggatttcaggaaaggggtgctccaagataccaaaaatatgactggcacattttggagataattaaattgtctgttatcttcatattaataacagcttgttggaggaaagaaaagactccacaaaagaacttgacattctgataaaaggatttgcttacactattcaatttaactgtacgtttttatatcatgtatgaatttttacttaaaacagatcttgattatatgtgcttattcttttaaaaaatcctccttgctgactattcatttttctcatacttagcttagatgacacttctcataggaagttatcaaaccttcatatcatgagagatatccctttcctgtgctcacagtttcctacattatacactatgatgtaattgcttatttacttgtccatcaatatccccagtgccctgcacctggcacatagcagacttcagtgattattagttgaatggaagaatgaatgaaagaatgtacgtaaatttttgtgagggtttgtagaagaaagaatttgcatctgattgggtgaaatataagatactctctaaaagatatatcattagagatatgtttaaaaatatatagagtttcataaaggggaaaaggcaagaagaattccagacaaagcaaaggaaacatcatgagtaaaccacagacacaggagcagtaaagtttaactatgtaatggccagttcagattggctagatctgtgattctcaaactcgacacacattaggatcacttgaaaggcttactaaaatcctaaagttactgattcagtaggtcttttgtgagccccaataagttgcatttctaacaagttcccagatgatgctggtccagagactttgagaactattgagctgcagcatagtgtatttggaaggagtggtagtaagtaaagatggaaagatagactggggctaaactgtggaaggttttaaatgataagttgaatattttgtgttattggtaggtgcaggagagttatcagagagtcttgaatgtggaagcaatttaatcagagctatttctttctctcttttttttaatgaaaaatatttatttattataaacctatttttttgttgttgttgtttgttttttttattatactttaagttttagggtacatgtgcacattgtgcaggttagttacatatgtatacatgtgccatgctggtgcactgcacccactaactcgtcatctagcattaggtatatctcccaatgctatccctcccccctacccccaccccaccacagtccccagagtgtgatattccccttcctgtgtccatgtgatctcattgttcaattcccacctatgagtgagaatatgcggtgtttggttttttgttcttgcgatagtttactgagaatgatgatttccaatttcatccatgtccctacaaaggacatgaactcatcattttttatggctgcatagtattccatggtgtatatgtgccacattttctttctctctttttttaaattacatgttaagttctgggatacatgtgcagaacgtgcaggtttgttacataggtatacatgtgccatggtgttttgctacacccatcaacccgtcatctacattaggtatttctcctaatgctatccctcccctagcccctcaacccccgacaggccccagtgtgtgatgttcccctccctgtgtccatgtgttctcgttgttcaactcccacttatgagtgagaacatgtggtgtttggttttctgtccctgtgttagtttgctgagaatgatggcttccagcttcacccatgtccctgcaaaggacatgaactcatcctttttatggctgcatagtattccatggtgtatatgtgccatattttctttatccagtctatcactgatggcatttgggttggttccaagtctttgctattgtgaatagtgctgcagtaaacatatgtgtgcatgtgtctttatagtagaatgatttataatcctttgagcatatacccagtaatgggattgctggatcaaatggtatttctggttctagatcctcgaggaattgccacactgtcttccacaatcattgaactaatttacacacccaccagcagtgtaaaagcattcctatttctccaaatcctgtccagcatctgtttcctgactttttaatgatcgccattctaactggtgtgaaatggcatctcattgaggttttgatttgcatttctctaacgaccagtgatgatc

SEQ ID NO: 28861 - DNA, 102372 bp, Homo Sapiens
atagatataaagatgtaaattaaagtctagttagtgagttatttgagggtaaagccagaataggaaaacattttgtttctcttttcctgggcttcacaatctttggagaataactaattttattttaactctagtgttagaggcatgtatgtcttctggtaatcagtaatagtaattcattttacctgtttgtttctcactgttttattctacttagaagaagacatgataggattgtgagtttttctctaactttggatgcagtgagatgaccagtgtgttccagttaaagaagaagagtgttttaaaatcataaaccaaataaagaatcctaccttacattaatttcttgcacttcttctgttctcatctccatttctctttttaacatgtggaatttacacttcaggtttaaatttcttgtcaggccaattacagattacagtaggatatggtctgtgtatataacaactataacttgttttagatcagagttgactgcaataatgaaaggagtgtccacactaaaacattacagaatacctccagtgaaggtagtcggctgcgcacgggtaaagatcgtaaccagaagaaagagaagccagacagcgtggatggtcagcaaccactcgtgaatggagtaccctaaactgcataattctgaagttatatttcctataccatttccgtaattcttattccatattagaaaactttgttaggccaaagacaaatagtaggcaagatggcacagggcatgaaatgaacacaaattatgctaagaattttttattttttggtattggccataagcaacaattttcagatttgcacaaaaagataccttaaaatttgaaacattgcttttaaaactacttagcacttcagggcagattttagttttattttctaaagtactgagcagtgatattctttgttaatttggaccattttcctgcattgggtgatcattcaccagtacattctcagtttttcttaatatatagcatttatggtaatcatattagacttctgttttcaatctcgtatagaagtcttcatgaaatgctatgtcatttcatgtcctgtgtcagtttatgttttggtccacttttccagtattttagtggaccctgaaatgtgtgtgatgtgacatttgtcattttcattagcaaaaaaagttgtatgatctgtgccttttttatatcttggcaggtaggaatattatatttggatgcagagttcagggaagataagttggaaacactaaatgttaaagatgtagcaaaccctgtcaaacattagtactttatagaagaatgcatgctttccatatttttttccttacataaacatcaggttaggcagtataaagaataggacttgtttttgtttttgttttgttgcactgaagtttgataaatagtgttattgagagagatgtgtaatttttctgtatagacaggagaagaaagaactatcttcatctgagagaggctaaaatgttttcagctaggaacaaatcttcctggtcgaaagttagtaggatatgcctgctctttggcctgatgaccaattttaacttagagctttttttttttaattttgtctgccccaagttttgtgaaatttttcatattttaatttcaagcttattttggagagataggaaggtcatttccatgtatgcataataatcctgcaaagtacaggtactttgtctaagaaacattggaagcaggttaaatgttttgtaaactttgaaatatatggtctaatgtttaagcagaattggaaaagactaagatcggttaacaaataacaacttttttttctttttttcttttgttttttgaagtgttggggtttggttttgttttttgagtcttttttttttaagtgaaatttattgaggaaaaatatgtgaaggaccttcactctaagatgttatatttttcttaaaaagtaactcctagtaggggtaccactgaatctgtacagagccgtaaaaactgaagttctgcctctgatgtattttgtgagtttgtttctttgaattttcattttacagttacttttccttgcatacaaacaagcatataaaatggcaacaaactgcacatgatttcacaaatattaaaaagtcttttaaaaagtattgccaaacattaatgttgatttctagttatttattctgggaatgtatagtatttgaaaacagaaattggtaccttgcacacatcatctgtaagctgtttggttttaaaatactgtagataattaaccaaggtagaatgaccttgtaatgtaactgctcttgggcaatattctctgtacatattagcgacaacagattggattttatgttgacatttgtttggttatagtgcaatatattttgtatgcaagcagtttcaataaagtttgatcttcctctgctaaattgatgttgatgcaatccttacaaatgattgcttttaaaattttaagctaggaaaagaaatctatagaaagtgttctgttacaaaatgtaactgttaccattggaaatttcacgtcataggaagttagcctttatctaccaactttcaagaacttgtttaataaagcgaaaaactcaaccaaatggtacaaaaccacagtgtaccattaaaatatgcactaagtctcttttttacaaaggctgtattcagcaaggcgctaacttgcttaaatgtgaattactaacttctaaaactgtactttgattcacatgttttcaaatggagttggagttcattcatattacaatatttgtgtgctaaacgtgtatgtttttcagttcaaagtcatgatgtttttaaaatcttattaaagtttcaaaaatctgaagattgtttatctagatgtaaatttttattaaaaagttgcacttatgaaaaagcaaaaaattagtctgacagatgtttgctcctggttttaaatttctacatttgacaaaaactaatgatatgtggggggaaagttgtgcaaagtaaatgtatgttgcaaataatcttttatgagcccttaaaaggcaaaaacgaagacacttgaaaataattctccatattcccagacataaaatttcaacacatttattacatagggtgccactaaaccatattaaacatatactcctatttgtgcacacatgaacataccctgccctttggaaaaaagtatgtctatgaagtaaaaaaaaaaaattgatttaaacgtctcagtaataaaataaatgagaggtttgtaggtagaatgtgcctgggaattgactactgtaatcacttcaaggaactctggcacagcctacccgcctaaaaggtacaaatggagaggtgacagtgtcagtgttctacccagggttagaatccaaaatgatgctagacagcctcctctgcattgatgagtttttttccccagaaaaataactattttctgcttttcttgtttttcattctgatgcttttgtggttctttgctacccattctgtctaactgggcatcattagtggtgggtaggctgaaaccatactcaagtaacttgtttggattttccttgtttcacagtagttttcagcactacacatgaacagcctgttggaggcagccagcttaacactcaacttggctctctcagagccatctctctcatctgatgatggtcttagaattcctggtggctcggaatatacgtcttttagaggcagcaaaatgattctgacccttttgagccagtttcagtttcatggccataaacagccttgtgaacctctatgcctctgataaccagttattctgaaatagtcattaccatgtgctagtcttgattgttcataaggcttaatgtaccagaatttaaatcttgagcatcttgttttctctgtttatctgaggtcatttaaaaagttttatttcaatttctctctatgtaccataatgaaactgggaaaatccattttattttaattttttttagtatactaaggggttttctgttagtgagagaggcttgctctgtgttaaactcacagggaagaattatccttcccctggaatacagacccagggtgcagctagcagtgctctggcctttgcatgagagaataatatccatgtgtctcttcctgaccttttgctgacaagtttccctcattaaaaccactttcttctgtgtggctttgtgcagtttgccataacccattacctcaaaaatggtgcccaacatgaggtaaaatccgcttatttcacctctggctttttggaaactgcaaaagggatcaactaagctatactagggatggacagcatccctgctggggctggtgatgggaaacccagccaagctaacatctgcaaagcatgctagtgtggtgcttattggtgttcatgtgccacagaggtcctgggaagtttgtgtaagggagattgagacaattaaatcctttggcactccaagtctggcagcctctgtgagacctaaggaaaaagaagttgggagaaaaccctcagcacctaagtgccattagaatagttgatgcagtctaaacgtttttttgtttgttttggtttttttttttttttgagacagggtctctgtcacccaggctggagtgcagtggcatgatctcagctcactgtggcctccgcctcccaggttcaagcgattcctgtgcctcagcctccctagtagctgggactacaggcacctgtcaccatgcccaactaatttttgtatttttttgtagagatgcagtttcgccatgttggccaggctggtcttaaactcctaacctcaggtgatctgtctgccttggcctcccaaagtgctgggattacaggcctgagccactgcacacagccacaacttttagatttgagacttgtcattgtgcagtgtgccacccaggggcctttggtaggaattgaggtatatcctgtgggatttcaaagacactaacagggaattggactcccagcaatggtcacaagagtaacctgaggctttaattgtttatatgatgacgaggctacacctacaaagtagtgaagctgaatggcaagcactttgggtttatcacgggattctcttctgccagatgaatttgctaggctgaccaatggggagggagcaaatggacctgccttgttcttgaattggatgttcagggcaatcagattcacataaccaccaagaggagacttcctgagaaactgagtgccaagtgaaccattctactgaggttaaagctgttttgagacaacttggcatttttgcatacttgcatgaaaatcctaggcatctaggataagtagtaaccaaatgaccttaattcagagaatgctggaaaagttgatggtttcttatacggagacatccctaactttgctccttctgccagagtgtaaaggatgaaataatcctttggagctgatatatgccccacccaaagtgggggtaatgagataaggggccctggaaagaatatgtctcagcaaaaatgaaaagtcaagggaagagcatcaactctagacttttcctaggcttgcacaggcagtacatcatgactcttggtctgcaacaaagtgatgactagctaaggagatagataggaaaggtagaatcactctaaggagcttgcagagagaaggatgcaggaaacaacactgatattagagtaggcattaagaacccccctatggagagctgatgcaaggaggttctggatgggagggttccctttggagatggaggcagttagctttccccactgcttggccagcaaagctccaatgcctcctgcgtccttgtagaagggtttagaggaagctaagcagttggccacatcttaacactgctgaaacaagactctcagacactccctacccccagaggcctctgtgccacctgagagattgattttctaggccgattgctggggagctcttcaagtccatttaaaccaaaagcaagcttggcccagggccagttcctctgccctcttcaaggagatgctaacttcatgtcctaatccatgtagcctggaacatagataggggaaggacttaacagacctagacttaataaaacacaggagcccaagaagctgttattcttggacctgatcaagtccacagtaaatttccctggctggagttgggtttggttttacttagaaccaggagactcagcataattactgcagatgctgttggctgctttcataagaccatgctcactcaccatccctttgtcagactccacagttgatatggacatgctgagtcccctcagcccagcaaagcagaacatctgaatggatgcaaacatggcaatgtctcttagtgaatactataaatcagtcttattgagtttgcagaaccccctgcacttccaaagcctgtcggaattgtgcagttgaagctggcacataccaaagatgagaaagaaaacattcccctcatacaagatttactgccattgccaggagggaatggtaggctacactaccttccaattccacaaccctgttaggccagtgagcaaatccagtgtctttggccccagattacagatcattatggatcattgtgattttaacagtggccaccatggcactcacagtgcctgatacaccaacagatgactgaactgattgcagccattactggcaacgtggtatgtcctagagctacgctgtccagttcttaagccactaagccatatacggctgttgagtacttgaaatgtgctggtctgaattaagacgtgctgaatgtgtagaatacacgagattttgaagacttggtttgaaaagatgaatgaaaaatgtctcctttttatatttagctgttgaaatataaatattttaaatctcttgggttaactaaaatatgccatgaaaattcattatacctatctcttttttaccctttttaataatgaccactagataagttaaaattgcatatgtggctcacattatatttcaattggacagaattactctagatactactaatgttctccaaatttctccagaaacagaagaaatattttgctttcacctgacagaacattaatttctggtttgttgtgggaatttcacactcctccagcaaataagtgcaatttatcagtaatgggttgggcaagcccattccattatattgatgacattttggtagtgcccctcacagaggaaactgtcctcactgtaatgcatgctctctaatctaagcacaagtgtccacaggtggcctggcccttgaatgaggatagatgccagagccaggccacccaagtacatatcttgggggctgtattagcaacagcctgaggagacattccatagcataataaggaaagtctattggccttacagacactaccaaaaaaaaaaaaaaagaaaaagaaaaagcctatgatctgttcggcctctttgggtattagaggcagcacatctcacatttcaaaatgtcattcaagcatctgtacctagtcaccagactggtagccaaatttaagtggagacccctacagcaagaagcctcagaagcaatacaataaaatataacctgattcccatggagttttatgtatctatgacaggtcttacatctgatacacctggcaacaagactctgccaatactggggtgggaaatctctccactgctgaatggtacgtgccttttaaacgacaattatttgtccattataaatctctggcagggactgttgtctcactaaagggaagtgattgtcagatctaacatccccactctacaatgggttcactgaaccaaatttcataagattagtgtatcagtgagtgtatccaccagtgaggaaaacagaaatcacaccactaattttaacagagagtttgatgtacggattggttaaacagatattaaagggctgaaaatgcagaacaagaacattaaggtaatagaggtaggatctgcaggaagcatctaccatcctgaggcctggtggaatgaagggatgaagctagtatgatgagaacccaaagctcaaaggaggggcccatggaattaaaactccagacctttaggaaagggaaactgcttagttagtactggtatcttggaggcagaacctcatggggcttggacttagaccactgaggagagggtgccagccaactgactgatgctggtgtctgaggaggcatgacgatgctggctcagagagtgtggaaggaaaaatctggcaactggattcaagtgctgctactggaacaaactgtttctaccagagtgaagaactaacatcttcaagtctccttctagagccccttgttgtcagaacctaacaggaagcagctggtgaaggagaaatgtgatgtgcagagtctcagccccagcatcacagagcagattatagaaggatagtttggaactgagagacaataatttaataattggcagtgtgtgacaagccacagaaatgtgaaatggaaatagtacatccaattgagagtcaagcccactgcaaggataagtggttgcctatgcagtaggtacggagaaagtttcactcctgctttgcctgagcaactggctcaatgatggcatcaatttcaatggaaactaagccattggttataatgatgataagtgttgatgtcccatggcactggctgctctgcacaattaatagaagtacttcaagtggtgcttttgagcaataaaacattctgcttcttgaatgaaaatgtctttacacagacatgggctgcgctaccggccttgctcttaggtcaggatgttggaccacccaggatgagaccattaaagtcatacgtatgtgctgctccttatggaaagagatgcacctcatccacaggctcaattaataagtcacatatttatttgtctcttaaaaaaggccacatcctgagaaaagcaaaacatttggaatgagaaagtcaactgagcctctgagccatcctatttatggtgacctactagatccagatttagacccaccacagaaacaaaaccatcatgaagggctgtcatacagaagtcagaactaactcatactggcagatttactttataggtccccctgcccctatgtaggtccgtatagtgggtcctgactgctttagacacactctagatatggggttgcactccacctgccccagtcagatagcacacatagattaaagtgtgtgactgactttactacctttgtcatgtgttgacatgttctcacatgatacaatatgacaactcatttatggccagtgtcaaacaacaatgggccaatgagtctgtcagcatggaattcactggcactcctatgcttctttccactctcattcagcaggtgaaataaagtgctcgaatggccagcttaaggaacaatcacactggccactttaagaacaaattctgtaaggctgactagcacaattctcattagctgtatacactgccatgttccatgtgttagttcaggtcctctgagaagcagatgtcaagacagaattaaatgtgcaagatattttggggtgagagtccatgacagattaaaggggagggagccagagaacatcaagagagagtttagaccatgatacagatctgacattgatgaaggatagggaagaaagaaggactgagtaaggagatcctcaactatagtgcagtttcaagtacgtttcaaccaggttgatgaggagtgcttgatctgaagtcatctgttaaaaaaagttctacttgcaagaatggttctgtatttgcattagtacccccactgtgctcaattagtggctaattattggctgaaagtagcctgaaggaagcacaaccttggtgcatacacagtggtggatccagaagggtagcatctggggctgtcagtcaattatgctctccacaataggagattgaagtggtacactttggtggccaccacattatgtaataataatttccctcttttttgtttggttttagaaatgaggtctcactctgttgctcaggctggtcttgaactcctgagcttaagtgattctccaccttggcctcccaaagtgctagaattacaggcataagccaccacacccggccaaattccttttttggtcccacattaaccatgatgaatagctgggaggattgtactgcatggatcacagaaatgtggatgaacataaatttagaggctcttttcttttttcttttttcattgaaatggcatctggtgacctttcccctgccccccacatccccagacaactctgaatctggggttgccacatgcctcctttgcaatttgagaacactgctgtggttctcatgctcatatcattagtcacctctgtgctgtaaaaatcttcctggatctcaagaggttgtctttgataaagggattgttatccccatggtctctgcagagattttcattctaggaaataaaagaaagtctggttctttcctgagggtagctgacagaccctgactggttgggctcgggcgaattcaaccctgagaagcatgtagaggatcaaggggcaaaaaacctctctgttttcctattccagatagggacagactatacccatctgaggcagtgacctctagtgccaattatcacaaagctatatatgtcactcccaactggatttggctatgggggatcatattagcatcccactatcaaatgatgcctcaagtattgctcctataggcaaggggcctcagccaccattttcctgggccttctgcactcatgtgtctatcccctgtgatgtccataccaaacgaatgcagagtatcatcttggacccaactcaaagtagcatttgtgtacccctcgcccgctttcaggattagtttttctgtgcagttaagatagcttcctttgcctcccctgcctttcccttcaaagagtcgtccacttcctgagggtagtcatacaactcttcaaaaaacaaagaaccagtgggcacagactatatcctcagcttctggcaccatcagtaggctctccttgggagcattatggacacagtttattgttattttacatgggtttttctctcatcaggaggtgtttgtaaggctcactaggggagattaccgatgagacagctggggatctcactatcaaagatgttgactccctaactcagattgtgttagacaactgcataactttggattatttactaactacgcaatgtgcattgtggtcaacccgattctggatgaatacttcaatacaagtagagctatcactcagcaactggtggagttagccatatggctccaaaacactcccaatcaaagccttggatctttttctcatagtttggcctgggctccatgattagaggtctcagggaactctacagatttttattttaaactttgtacttttaggaccttccttattttacaaaatttccttggcatagtcacatactccagaaaccccactgaaaaatccaatttatgtttagtcccagtgggcaggcacatctcccagaagaacaggagcccatgtatttcgtcttactaacactttggcttgcacgttacccccaattaaacctattcttatgcccattctacataacacaatagtgtattcttccactcacctttcaaagacagactaaatgggcaaaactagaggcagaaagatcaggctgttgaaattatgagccaatgctaaggtagtgagaatggaaaagaatcatgggattcttatgacatttaggagatgggatcagtgagacttgctgattattatgtggggagaaaggggaagggaagaagctagggttatgatttacaatttcttttggagaaatagatttattcattcaactgatgtttattcactgtataccatgagtcaggcagcatgtttgatgatgaggatacagaagaaaaatacactgggagacaaaaattaacataaaataaaagaacaattacagagacaaatagatataatgtgcctcctcatatgatgcactgagaaggatacaacctcacttctgtagtgttcctgctaaaaaatgaataagctgaaattaatcatatgaaaacatcagacaagtccaaatagatgaacgttttacaaaataaactgcttgcactcttcataattattgaagtcataaaagacaaagaaatactgggaaagtatttcagaccaaaggatactaaaaagacatggtaattaaatgtaacatgatcctggattggactttgaaccagaaaatgttgtcttttgtcataaatgacattattggaatgattggctaaatatgaataaagtctgcagattacacaatgcgacaaagctgacttactaatttcaaagattgtactgtggttatgtaagagaatgttcttgtttttaggaaatacacactaaagtgtttagaaggaaaaggctgagctattggctgaaagaaggcgtaagcagtagcagagcaacaaagcatgcttaggctctggagttaaactacctgggttctaaccccagcacagcaatttgctacctatgaaactttgggcaagttatttaagcattctacaaatgaaattttctcatgagtaaaacggacgatgcttataatagcccctactccatagaggtgatatgagggtgaaattagtgagcatatgtgaagcacttaggctcatgcctggcatgtatgtgtcatcaatgctggctgtacttaagctatatttcactctgtgtcctgtgaatacagaaggaaatgtgacacagcctccttcttcaaggagacacagtgtagtaggaaaaataacaaggttaacagataataataaaaccatgtgatgagtaccctgatctggacttgagctgagagcagctgagctagagcagtaaattctgtggggggatgtcaggaggggtttcacggagggcttaggatttaaattggatcgagagatgtgaacagaagtttgcccaaaatatgcatctctcacttctgccaggccaagggcatcatacaaaactctgtataagcacagagttccagaaggttattgcgtactatagtgtatgcataggatatgcagtaatgtagcataggatatgtaatagaagggccagactcaccttccaggtgtgtggagagcattgactgccagtctgttgacacaggttcagatcccagcttaaatatcaatggttgctttgagcaactcatgaaacctctctgaacctgtttcctttccaaaatggagatactagtgtttacctcagagttcctgtgaggattaatgtaaagtgcttagcacaatgctcagtacatggcctgtgttcaataacggatagcaattagtaataatactggtattagacatttctagggctccccaaatttcctggttctccttttcttccaggtacatgcttccctgaacagggcctgagtgaacatggccctgtaccttcctttggataacaaagtggaagtggaaaggatacatgtcctttctgactggagccattgaagaggcagtatggtttgattctctacatactcttcccctgatacaacaatttggaagttcaagttgggatggcagcatcataagatggtgatatctctgtcagcaaaggtcttggggatgatcagcagtgtccctgccaacctgtgttgggcatgtatcatgcgcaagcaacaaacctttgctgctttaaggcactgagattttagagtttcatcagctttagccacacttggaaaccccgaagaatcagggactattctaaacacgttgatgtcccatgccaatctccagataagggaaaatgggcactcttcacctctcccaccttgtcgatgggatgacaaaattgggtgcaaggtttggcaacaacttagcttaacagaggaatcccaactcagtataaacaaagaaaaaccaccaggcagatgtatggccacttaaagacatacggactcagaaaagctcccaaacagttcatagaggaggcagtaaatattgagcatatctttctctcttcatttaaactaactgaattattttttcatattcaagcactataggattaatgatattgtaaccaaaccttattggaaagtataagatggggattgaacctggtcggaggatgatatttaagttgaggcctgaaggaggaagaggagctagctatgtgaaaagaagaaagcatgtacaaaggcaggagacagcatcaggagtctggggaagtttggtatggtcataacatatgaatgagggagagggggcaagagctgaggctagggtggtaagcaaggtacagagaaggtgagtgctcataaaccagggaaaggaatttggattgttggggcaatcaccagccgttgatggatattaagcaagagagtgacataatcaggtttacaattttacaagcacacaagagttacagtgtggtgaatggattggaatgagcaagaccacaggaggagagagtgcagagccctgaattaattagagacatagtgtatcaagtgtatcagtcagggttccctacagaaacaaacccagtacttgtgtgtgtgtgtgtgtgtgtatatagatatagatatatatatatatatatacacacatacacatatatatatacactatatgatatataatatatcatatataaagcatataatatataaagtatatcatatataaaatatatattatatacatattagattagagatgtatttaaggaatcagcttatgcgattgtgggagctggcaagttcaaaattcatagggtaagctggcatgctggaaacttagataggagttgttgctggagtcttcaggcagaatttctttttcttcaaggagacccaagattttcaactaattggataaggtcaacccaaattatcaacagtaatatccttaaattgaagtcaatttaaaccagacccattcattaaaccatatacaaaaattgacacaagatggattaaagacttaatgtaaaaccccaaactgtaaacaccctggatgacaatgtaggaaataccattctggacataggaactggcaaaaatctcatgaccaagatgccaaaagcaatcacaacaaaagcaaaaattgacaaatgggatctaattaaaataaagaccttctgcagagcaaaagaaactatccacagaataaacagacaatcaacagaatgggaaaatttttttgcaaaccacgtatctcacaaaagtctaatgtccagcatctatagtttacttatataacaaacctgcacatgtaccccaaactgaaaagttaaaaagagtcagttgaggccgggtgcggtggctcacgcctgtaatcccagcactttgggaggccgaggcgggtggatcatgaggtcaggagatcgagaccatcctggctaacaaggtgaaaccccgtctctactaaaaaaaaaaaaaatacaaaaaattagccgggcgcggtggcgggcgcctgtagtcccagctactcgggaggctgaggcaggagaatggcgtgaacccgggaagcggagcttgcagtgagccgagattgcgccactgcagtccgcagtccggcctgggcgacagagcgagactccgtctcaaaaaaaaaaaaaaaaaaaaaagagtcagttgatggtagatttaacttcatctacaaaataccttcaagtaacacctagtctaatgtttgaataacttggcactatagcccagccaaggtgacatataaaactaaccattgcaggtagtttaggaggtagaatagagaggttttgctgattgaatgaatggagattgaggaatgtggaagaatcaaaggtaactccgatttttgacttgagcaactggataaaagataacactgccgattaggttagagaaaggtgaagaaagtgcaggttagtggtggataaccattcaattttggatatgagtagttttaagtgttttcaagttatccaagcaaagatacttaagtgggggtcagaagagagataaatgtaagatgtagttttgtaagtcatcaggatatcatggcaagttagcagtgggagtgcatgggatcacttggcaagatagtgtacagtgaggaaggaaagagaagaagacctaaaagaaagccctgagtaaacccaacacttagatgccaagtagaagaggaatattcattaaagcaaatgaaaaacgcagccagatatgtaagaaagccaggagacaaacaactgaaaacaccaaagagagagcgactgcttcttggagggagcagatttattgccatcatttttcttgtagacttcagggagccagcaaaggcattcaagtaggaagaatcatttaactgcaatgagcagggtagtattcgaactatgagaccctattggttgggaggttatttagggaccattttctagccaagggaagaaataataagggtctgatccaggactgttgatataggaatagaaaggaggaatgggcttgagaagtattttgaagcaaaatcaacagacgtctaattggatatgagcaataaaaagtccaaaatgacccagaagtcttaagtggaagagaccagatgaagggtaggaagtcagaaggagatattagcttgagaggaaaatatttgaaggtcaagtttggacatactttaggcatggcaaaatatttatctgtgtttcccagatgtaccatatctatcataccctttcatttttctaagtctgtcttcagcctcctccatgaaaaacacctttcccttcttgttcgcctggacattatctactcaatcttcaaagcccaaattaaatgtcacttctcagtagttttcactgacgattccaggctgaattaattgcatcctccatagtgttcctgcatcactgtgttcaaaactttgtttttaagagcattcatcacattggactacaattgtattttacatacctgtttcccacactagactggaggtcctagagccaagggcctctgacttagtccgtctggttcttctagaagtaagaacattgagcttgcttagttgatctccatcttggagctcaggaaaggggcaaggctagatatatgaatattatagtgtcactgatatagaggcgatctctaaacaaatggaaataaatatatcacgcctggttgtggagtgactaaagaatacaaatattagatggcagcaggaccaaatgtcagggaacgcttacatttatccaacaggatgaggatcaggagaatgtgagaattgagctttgtctgtcaattaaaatatatttattggggaaatactatgacctatttaatatttaggcactgaaaacacagcaacaaatgaggcagactagttctcttctcttgtagaacttacagaccagaaaggacacatagattccctgagaaaaagagggaagttagttgtttcaaatgctgcaaagtgtttgagaaggataaatactttagtggctttcaaatttgaaaagtggaagccaaaataaccatgtagccaatttcattctaagaataaaggccaagggtgttgtgaaggaaaggaagttgcagattcaggtgcaaaagtatagaagtaagaaatatagactttttaaaatttagtaggcccttgagatgcaaaaattggagcaggtggtataatcagataatgtgggctccaagagagaggaaattgaccacaagcattgaaaccatggtttggggtagcaaagaggtctaagaaatttactgacctcttcttttcccctggaagtagaaggagaagcagtatccattgaagggagtttccagcacagtggttaacccagggaggattaatcagttggaagctaattcaaggggtaggaaagcagaggaaaagaaaaaaatgtgaagatttagagcagcttctttatattaggatggagattttaaagggcacagtggaagaagctgatagagtgtgtaagaggtggagtgtgcttgagtggtagtagttcagggcatgaactgggtgcatgtgaggctattaaagatggtagtggcttgcccaacatccacccaaacctcttcaggtatgtcttcctataccgcagaagctagaaagctaaaaagccacattttccagattcctatgcagacaggattttggatgtgattttggtacagccaatcagttgtaattacatcatgtgtgatttccaaactgagccaaatgggaaggaagtggcatgcaagacattcattttgctggtgagggtcgggagccaatagttctggcagcaggttcctaatccccagatctcagcaaactacggttttcctagaaccaactgttccagaaatgacttactgatccccaggcaaagtacatgaacagatacttcccaaaagaaggcatataagtggccaagaaacatatgaaaaactgctcaacatcactaatcatcagagaaatgcaagtcaaacccactgtgagataccatgtcacaccagtcagaactgctctaatttaaaatgtcaaaaattaacagatgctggcggggctgtggagaaaagggaatacttatacactgttggtgggcatgtaaagtagttcagccactgtggaaagtagtttggagatttctcagagaactaaaagtaaaactaccattagacccagcaatcccattactgggtatataaccaaaggaatataaataattctaccaaaaacacacatgtactcatatgttcatcacagcactattcgcaatagcaaagacatgcaatcaatctaggcgcccatcaatattggattggataaagaaaatcatggaatactatgcagccacaaaaaggaatgaattcatgtcctttgcagcaacatggatgccactgaaggccattatcctaggcaaattaacacaggaacagaaaaccaaatactgcatgttctcagttataagtgggagctaaacattgggtacacatggacataaagatgtgaacaataaacactggggactactggcggtgggtagagggaaaggggaaagggctgaaaaactacctattggatactatactgactacatgggtgactggatctctcgtaaccctaatctcagcatcatgcaatatacccatgtaacaaatctgcacttgtatcccctgaatctaaattaaaagttaaaattataacaaaaaaataataaaaataaagatatttgatttaaaaatatataatctggtaaagaaactgaaatgacacaaaagaatggaaagatatgctatgcttatgaatcacaatattattaaaattacagtaccctcccaaagcaacttacagattcaatgcaatccttatcaaaataccaatgatattctccatagaaataggaaaaaaattcctaaaaattatgtggaaacacaaaagactcaaatagctaaagcaatcctgagtaaaaagaacaaagctgaaggcattacattattggacttcaaaatttactacaaagttataataaccaagacagcatggtactagcataaaaacagacacatagaccaatggagcataatagagaacccagatatagaggggaatccaccattgctgaggcttgagtaggtaaacaaagctcaggaagctcgaactgggtggagcccaccgcagctcaacgaggcccacctgcctctgtagactccacctctgggggcagggcatagctgaacaaaaggcagcagaaacctctgcagacttaaacgtccctgtctgacagctctgaagagagtagtggttctcccagcacggtgtttgagctctgagaacggacagactgcccctcaagtgggtacctgacccctgtatagcctaactgggagacacctcccagtaggggccgactgacatctcatacagctgggtacccctctgagacaaagcttccagaggaaggatcaggcagcaatatttgctgttctgcaatatttgctgttctgcagcctccactggtgatacccaggcaaacaggtctggagtggacctccagcaaactccaacagacctgcagctgagggacctgactgttagaaggaaaactaacaaacagaaaggaatagcatcaacatcaacaaaaaggacatccacaccaaaaccccatctgtaggtcaccattataaaagaccaaaggtagataaaaccacaaagatggggagaaaccagagcagaaaagatgaaaattccaaaaaccagagtgccccttctcctccaaaggatcacagctcctcaccagcaatggaacaaagcaggacggagaatgactttgacgagttgacagaagcaggcttcagaaagttggtaataacaaacttctccaagctaaaggaggatgttcgaacccatcacaaggaagctaaaaactttgaaaaaagattagacaaatggctaactagaataaacagtgtagagaagaccttaaatgacccgatggagcggaaaaccatggcatgagaactacgtgacgcatgcacaagcttcagtaaccgatttgatcaagtggaagaaagggtatcagtgtctgaagatcaaatgaatgaaatgaagcaagaagagaagtttagagaaaaaagagtaaaaagaaacaaacaaagcctccaagatatatgggactatgtgaaaagaccaaatctacatttgattgatgtacctgaaagtgatggggagaacggaaccaagttggaaaacactcttcaggatattatccaggagaacttccccaacctagcaaggcaggccaacaatcaaattcaggaaacacagagaacaccacaaagatactcctcgagaagagcaaccccaagacacataattgtcagattcaccaaaactgaaatgaaggaaaaaatgctaagggcagccagagagaaaggtcaggttagccacaaaagggagcccatcagactaacagcggatgtctcagcagaaaccctacaagccagaagagagtgggggccaatattcaatattcataaagaaaagaattttcaacccagatttcatatccagccaaattaacttcataagtgaaggagaaataaaatcctttacagacaagcaaatgctgagagattttgtcaccaccaggcctgccttacaagagctcctgaaggaagcactaaacatggaaaggaacaatcagtaccagccactgcaaaaacctgccaaattgtaaagaccatcgatgctaggtagaaacagcatcaattaacgggcaaaataaccagctaacatcataatgacaggttcaaattcacacataacaatattaaccttaaaagtaaatgggttaaatgccccaattaaaagacacagactggcaaattggataaagagtcaagacccatcagtgtgctgtattcaggagacccatctcacgtgcagagacacacataggctcaaaataaagggatggaggaatatctaccaaacaaatggaaagaaaaaaaaaaagcaggggttgcaatcctagtctctgataaaacagactttaaaccaacaatgaacaaaagagaccaagaagcccgttacataatggtaagggatcaattcaacaagaagagctaactatcctaaatatatatgcacccaataaaggagcacccagattcataaagcaagtccttagagacctacaaagagacttagactcccacacaataataatgggagactttaacaccccactgtcaacattagacagatcaacgagacagaaagttaacaaggatatccaggacttgaactcggctctgcaccaagcggacctaatagacatctacagaactctccaccccaaatcaacagaatatacgttcttctcagcaccacatcacacttattccaaaattgactacatagttggaagtaaagcactcctcagcacatgtaaaagaacagaaatcataacaaactgtctctcagaccacagtgcaatcaaattagaactcaggattaagaaattcactcaaaaccgtacaactacatggaaactgaacaacctgctcccgagtgaatactgggtaaataacgaaatgaagacagaaatatgttctttgaaaccaatgagaacaaagacacaacttaccagaatctctgggacacatttaaagtagtgtgtagagggaaatttacagcactaaatgcccacaggagaaagcaggaaatatctaaaatcgacaccctaacatcacaattaaaataactagagaagcaagagcaaacaaattcaaaagctagcagaaggaaagaaataaccaggatcagagcagaactgaaggagatagagacacaaaaaaccctttaaaaaatcaatccacgagctgtttttttgaaaagatcaacaaaattgatagaccgctagcaaggctaataaagaagaaaagagagaagaatcaaatagatgcaataaaaaatgataaaggggatatcaccaccaatcccacagaaatacaaactaccatcagagaatactataaacacctctacgcaaataaactagaaaatctagaagaaatggataaattcctggacacatacaccgccccccccaagactaaaccaggaagaagttgaattgttgaatagaccaataacaggctctgaaattgaggcaataattaatagcctaccaaccaaaaaagtccaggatcagatggtttcacagcagaattctaccagaggtacaaagaggagcttgtaccattccttctgaaacttccaatcaatagaaaaagagggaatcctccctaactcattttatgaggccagcatcatcctgataccaaagcctggcagagacacaacagaaaaaagaagaattttagaccaatatccctgatgaacatcgatgcaaaaatcctcaataaaatactggcaaaccgaatccagcagcacatcaaaaagcttatccaccatgatcaagttggcttcatccctgggatgcaaggctggttcaacacactaaaatcaataaacgtaatccatcacataaggagaaccaaagacaaaaaccacgtgattatctcaatagatgcagaaaaggccttcgataaaattcaacagcccttcatgctaaaaattcttaataaactagctattgatggaacgtatctcaaaataataagagtatttatgacaaactctcagccagtatcatactgaatgggcaaaaactggaagcattccctttgaaaactggcacaagacagggatgccctctctcaccactcctattcaacatagtgttggaagttctggccagggcaatcaggcaggagaaggaaataaagggtatttaattaggaaaagaggaagtcaaattgtccctgtttgcagatgacatgattatatatttagaaaaccccatcatctcagcccaaaatctccttaaactgataagcaacttcagcaagctctcagggtacaaagtctatgtgcaaaaatcacaagcattcttatacaccaataacagacaaacagagagccaaatcatgagtgaactcgcattcacaattgctacaaagagaataaaatacctaggaatccaacttacaagggacgtgaaggacctcttcaaggagaactacaaaccactggtcaatgaaatgaaagaggaggcaaatggaagaacattccatgctcatggaaaggaggaatcagtatagtgaaaatggccatactgcccaaggtaatttatagattcaatgccatccccatcaagctaccaatgactttcttcacagaattggaaaaaaactactttaaagttcatatggaaccaaaaaacagcccgcattgccaagacaatcctaagcccaaaaggacaaagctggaggcatcacgcttcctgacttcaaactatactataaggctacagcaacccaaacagcatggtactggtacccaatcagagatatagactgatgggacagaacagaggcctcagaaataacacccacatctacaaccatctgatctttgatgaacctgacaaaaataagcaatgaggaaaggattccctacttaataaatgctgctgggaaaactggctagccatatgtaggaagctgaaactggaccccttccttacaccttatacaaaattaattcaagatgtattgaagacttcaatgttagacctaaaaccataaaaaccctagaagaaaacttaggcaataccattcaggacataacgcatgggcaaggacttcatgactaaaacaccaaaagcaatggcaacaaaagccaaaatagacaaatgggatctaattaaactaaagagcttctgcccagcaaaagaaactaccatcagagtgaacaggcaacctacagaatgggagaaaatttttgcaatctacccatctgacaaagggctaatatccagaatctacaaagaatttaaacaaatttacaagaaaaaatcaaacaaccccatcaaaaagtgggcaaaggatatgaacagacacttttcaaaagaagacatttatgcagccgacagacacaagaaaaaatgctcatcatcactgctcatcagaaaaatgcaaatcaaaaccacaatgagataccatctcacaccagttagaatggtgatcattaaaaagtcaggaaacaacaggagctggagaggatgtggagaaacaggaacgcttttacactgttggtgggagtgtaaactagttcaaccattgtggaagacagtgtggtgattcctcaaggatctagaactagaaacaccatttgaccccccgatcccattactgggtatatacccaaaggattataaatcatgctactataaagacacatgcacacatatgtttattgcagcactattcacaatagcaaagacttggaaccaacccaaatgtccatcagtgatagactggataaagaaaatgtggaacatatacaccatggaatactatgcagccataaaaaaaggatgagttcatgtcctttgcagggacatggatgaagctggaaaccatcattcagaacaaactatcacaaggacagaaaaccaaacaccacatgttctcactcataggtgggatctgaacaatgaaaacacttggacacagcgtggggaacatcatacactggggcctgtcatggagtgggcggttgggtgagggatagcattaggagaaatacctaatgtaaatgacgagttaatgggtacagcaaaccaacacagcacatatatacatatgtaacaaacgtgcacattgtgcatatgtaccctagaacttaaagtacaataaaaaaaaatagagaacccagatataaatccattcatttatagcccactcatcttcaacaaaagcatgaagaacatccagtggggaaaggacagtcttttcaataagtggtgctgtacaggctggataactatatgcagaagaatgaatctatacccctatctctcaccctacacaaaaataaaatcaaagtggataaaagacttgaatctaagacctcgaacgatgaaactactagaaggaaacactggggaaatgtcccatgacattggtgtgggcaaatatttttttgtgtaagacctcaaaagcacaggcaacaaagtaaatgtagataaatcggatcacatctgattaaaaagcttctgcacagtaaagaaaacctatcaacaaattgaagagacaatccacagatggaagaaaatatgtgcaaactatccatctaacaagggattgaaaaccagaatacataaggagttcaaaatactcaatagcaaaaaagacccataatctgatttaaaaatgggcaaaagagccgggcgcgctggctcatgcctgtaatcccagcactttgggaggccgaggcgggcggatcacctgaggtcgggagttcgagaccagactgaccaacattgagaaaccccgtctctactaaaaatacaaaattagcaagggtggtggcacatgcctataatcccagctatttgggaggctgaggcaggagaatcgtttgaacctgggaggcagaggttgcggtgtgccaagattgtgccattgcactccagccagggaaacaagagtgaaactccgtctcaaaaaaaaaaaaaaaaaaaggcaaaagatctatatagacatttctcaaaataatacatacaaatggtcaacaggtatatgaaaaaaaggttcgacattaccaatgattagagaaatgcaaatcgttagagaaatgcaaatcaaaaccacagtgagatatcgtctcaccacatttaaaatggcctgtgtcaaaaagacaggccctagcagatgttgatgaggatgagaagaaaggtgaatcctcacacactgttggtaggaatgtaaattagtatagccactaacagtatggaggttcctcaaaaaaactaaacatagaataccatgtgatccagccattctactacttggtatgtatccaacaataaaaaggaaatcaatatattgaaaggatacctgcactcccatgtttattgcagcagtattcacaatagccaaaatatggaatcaacctaatttcccaacaaaggatgaatggataaagaaaatgtggcatatatacaggaaggaatattattcagccctaaaataggatgaaatctggtcatttgcagcaacatgagtggaattggaagtcattatgttaagtgaaataaaccaagtaaaaagcgacacatatcacatgttcttactcgtggaaattatataagtgaatctcatggaggtagactagaacaatggttaccagaagtcaggaaggttgaggggagagggagatgaaaggaaaaaaaaaagaatataaatatatttattaccactaaactgtacacttaaagatgtaaaggtgacaaattttgtatgtatattttacctcagcaaaaaggcataagagtaaacaaagaagcaaacaatattaagtcttaagaaagcaactggttaatatttaattatattataatttttaacaaaaaggagaacaaacatctgcatattgttctattgcgctaatgaataatagcaatggaattacagtataataacatttgcactatacctcacagttgtcacacagtttcaccataaattttaaacacaaataaaaacttcaagtggtatcatagaatgacagaactgaagaaactgaggtttttttgtcttcatatttacaataactgtgctattgttcaaacagaggaatgttgagcatcacaagtgttagaaacatgaagtaactgtacctgaaggaagcttgaatggattttaaactgtgatgaactttttctcaaaacagaaatgtatagttaggtccaggaagcctggggattgcgtgtataactggaggttttccaaattaacttccatttagaatacaatgttgatgaaaagagatgtaatttaaatgtgctgatttgaagtatgcttatctattattgcaactcaacagtagtctcagcaatttgtttagaatatagctcaacaaatgattttgttttcagagaagagcgtgttcccactgacatgatttagaattgttgacatggtgataataacaaagcagaccaaattataattggttttcttcttcttccttctctagaggcagtgcacttcctcattgcctgcaaccaaggaaatgctcccattgccctggccttgatatgtcactggtttcctactgtgttgttctagaaattttttcctggaagcccagataagcctcctcctccagtccttcctataattctgtaatcaacaaattccctatatgaaaatccctctttgcttaaactatctagttatgtattctaactattctagttatctgcaactaaaccctgactgatacagatagtaggcaaggaacaggggattttgcttagagcaatagctgttaaaaacattcattcctttatccatccattcactcaacaaatacttacatggatctctctgaatatatatagctatgcctatgtgttattcaaatttggggtattttctcctgagagcatttaattttgactaggcgatcaagtcatgcacaagagagatggattggacaactatattagttagaaagcgtttggctgtcagaaacagaaacactaactcaaaatggttaaaactattaggaaatatattatcttacaaactggaagttccacaatgggtcaagttttggggtagctcaatgatatcattaggtattcaggttcttcctgtccctctcttctgccatactccatattgacttcatccttatacctgcagcaagatggcttcagctcaaccagaaacaacaatgatcagagaaagagaacagaatgattctctcttaggagtaagtagattgctgtgtcattacggccccactcacaggtgatctgtaggacaacggggaagggaacctgttgggcagaactttgagtcatgtatttggttgtccccttcgtctggaacttgtcttatttgccaggaagaagaaaaaggctgtagcaaggatctatgctgaatcatggcagagactaatgttgcggctggatggtcagggtcttggaagaagcaagtttggagtattgcaagtttggagcaagtttggagcaaggaaatttgagaaagaagtatgtgaattgatctagaatgtatgtcttgcatatgaatatttatcaaaaggttctctttgtaggagagctgctaaatagtcagatgggcttaatgcccattcagtggatatcaatcagactctctctaccactccggtgcttgatggatgagctcatatacaaagtggccttggggacagagatgaaaatatgcatggactcaataatatgaatttcttctcaccaaaacatactacttcttggatgcccaatttaccagcagcagccattagccctgggtccctgatatggtataatatcctatgggtaccaacgagccatcttgggacagtttgattggtttggaccccttttattatagactggacagtgacttgtttcttaacttgaatagattgtaactccaaattggatttgttttcctgtttaccatacctcggctagccctaccatctgtagatttattgaataccttacacagcactattgtatctcacacaacattgcttctatcaaaggaactcacattaccctgatctaagtacagcaatgaaatgaagcctgttggcttcactggttttaccacatgccaactcacctagaagaaatcagcctaataaaacaatgaagtcacctcttataggtctacttatgacatggcctagcaaaaaacaccctgtcagtttggggtaccatcttgcaggaatgtgctgtacatgctgaacaaggactagtgatcaacatatggtgttgtttcctccataaccagaacacatggggctgagaaccaagggatgatggcaagattgacatctcatgatccacctacaaaaaattgggtgtttggcttcctattctcacaactttggtttctgctattttagaattagaagcttattattattcaatatttctttcagggaacacaacaatgattcccctcaattagaagctgggactgccacctcatgctggtaggcaaaccagaaaaaaaaaaaagataattactacctgggctaaggcaactgatcctgattatcattaaatgttatacattataggaatgaactagtttgcttttattactctactgagacatcatttatgttatttccactataacaatgaacattgttgtacatgtccccttgtacacatgggtgaaagggtagatacctgaaagtggaattcctaggtcacagaatatgtgaatatttaactttacaatgtgttgtcaaaaactcaccaaagtgggccaggcgcagtggctcatgcctgtaatcccagcacttcgggaggccgagacgggcagattacctgaggtcaggagttcgagatcagtctggccaacatatagtgaaaccccttctctactaaaaaatacaaagttagcctggcgtagtggcacacacctgtagtcccagttacttgggatgctgaggcaggagaattgcttgtacccgggaggcggagctttcagtgagctgagatcgtgcactgcactccagcctgggcaacagagcgagactctgtctctcaaaaaaaaaaaatcaccaaagtggttgtacccatttgtaaccccacctacaatgaccaaagtcctatttgtatatattcgtgtggatatttatttagttttgctaatctgatcagtgtgaaaaatctcattattgatttaacttatattcccatgattacttgagctcaggcatcttttcatgtctgtggtgatatttgaaaaaaaaatagtgtcaattatgttttccacaagaacagtagttacattctgagcagtggtatgcaccatctcatgaaacaattcttgtattcatgcccatgcaacacatttttatctctaattaggtctgggttgtttagtatcaaatttagctcccttgagggtataggacaaaagaggaaagccagtgcaggattttaaatttacatctgataatctgtaaaatggacacttcatatggcttgtgtgtgtgtgtgtggggggggggcctcaatctctaattagtgttgtgtaaaccaggaagtgctgagatgtaatcttagggattttgtcccttgagttcctgttagtaatttgggtttctaatggtataacgtggattgcattgtagtagaactgccatgcctcacgggtttgcagcaacctcaaatgctacagtcaagtatgagtcatagcatgccagagctggatggtatcttcacaatcgggctatccacagcccataattggtgaaggggggaaactaaggcgaatagagctcaacctgtgaggtggcaaagagctgagttcccaattgcgtgctccagcttgatctgagacctcagggtggctgtgcggtgtctggtcatatgataattttccacctgtgctatgacatgaacaaggctgctgttgggagacaattttccatggatttgttgagtttctgtatgtctcaggagagcttttgtcctttgtctctgactcagtagtcttgcatcttctgccagcatctataaaactgcaactagttaccttgttacttgaaagaagagtaaaatctcagatacttcacagctcctcacagttgaaagcagtagtttcagaagctattaataaatgttttgtgtgataagaatcctctcatcaaattcgttttggaaaagctgaagccaaaaaaagaatttaaaaaaatatagaaggaaagtgggttcttttcctgttagactctttgataaactaaacagcattataaatggctcttgggcatggggcagggatgggtggagtgtgctacgtttcaagaattattggaataggaagccttgcttctcccttcctctgtgggatgcttaggaacactggaaataagaatagaataaaagtagtagaaacggaaagtacgtataatataattatgaataaggatggaaatgcagttggggtggttttcatatcctttgtaaactagaatgtggtaagctaacagttatggaagcagtacctacacagtccttttgctggtgtgcccaaaccaaggaagataatgggattttgcccaagggtcagattttagagccaaaagggggtctagaaacaatgtccaacccttccattttacacatgaggcaccaaggcctagtgggaggaaggcatttacttagagccacccagttcatgggtggtaattttagcagtaaaacgtaaatgattttagtcacttttcagtgttcgtcacacattatttgttctcatgttatcgtattgttttatttatttgtaactcagttttaaggtttcataaggcaaatagcattttgtctaacacgtaaagcttctactaaagtgtaacaatctattgaatatctacgatattcactagtcactcttcaaatccaatactgcccaaaacgactttttgccatgatgaaaatgctccagccagacacggtgactcacacctgtaatcccagcactttgggaggccgaggtgggcacatcaccagaggtcaggggttcgagaccagcctggccaacatggtgaaaccttatctctactaaaaatacaaaaactggccaggcgtggtggtgtgcgcctgtaatcccagctattccagaagctgaggcaggagaatggcgtgaacctgggaggcggagcttgcagtgagccgagatcgcgccactgcactccagcctgggagacagcaagacaccgtctcaaaaaaaaaaaaaaaaaaaaaaaaaagaaacaaagaaaaaaaaaatccatattgccagtgtccaggatggcagccataagccacatgcgactattgagcacttgttaatgtggctactgtgattgaggaactgttttcttaatttcatttaattttaagtaattgaaatttgcatttaaatagccacatttggctagcagctgctgtcgtgagtgctgtaatgacgaactgtagtgaccatacactacagtgtgcactctgggaatgaggaggaattaacggctaaggttggagtcagaatccgagttattcctttttgttgatctatggcaagcagtcatgccactggtgcaggcctgaagccccgttcacttgttccacaagcatttagcaagcacctatatgccaggctttgagtgggagtgtgggggtgcaccaaccactggccacgtggttataagggtctgggcctgtggaatgaagcagaagacgtcatcgtgaaggaatcagtttcaggtctcgcgagagttggcacatgccacgcgagggccactgccctattggcttctgagtcacggactgccccggaagcttctgggccacggactgccccggaagcttctgggccacggactgccccggaagcttctgggccacggactgccccggaagcttctgggccacggactgccggaccgttgggctgtgaggcagcgtctcagcgaggcggcacccggagccatgtcttcacataggaggaaagcgaaggggaggaataggagaagtcaccgtgccatgcgtgtggctcacttagagctggcaacttatgagttggcggcaactgagtcgaatcccgagagcagccatcctggatacgaggccgccatggctgacaggcctcagccaggatggcgggaatctctaaagatgcgggtcagcaaaccctttgggatgctcatgctctccatttggatcctgctgttcgtgtgctactacctgtcctactacctgtgctccggtgagtgctggctcaggccaggcagggaaatgctgggggagggggagggggagggagaggggggcggggtgtggcaacacaccggcaccaaccataggccttcctgccccttcctgtcctctctcctcccaaaggcctttatggccctatcctcagcagtccttacaaagtcctgccctctctcgcctggccgcaggaagtctttcctgcctaaactcacttataaaagactttccctccccaacttcccctaacaaaagccttcccttcctcacttcccgccacaaaatagactaacctcccttgtcgcccctttttaaaaattgaggacaaggcacggtggctcacatctgtaatcccagcactttaggaggctgaagcaggtggatcacttgaggtcaggagtccaaaccagcctggccaacatggtgaaaccctcatccctactaaaaatacaaaaattagccgggcatggtggtgcacgcctgtaatcccagttaatcgggaggctgaggcaggagaatcgcttgaattcgggaggtggaggttgcagtgagctggcatggtgccactgcactccagcctggtgagagagcgagactccgtctaaaaagaaaaaaaaaaaaggactgggcgcagtgctcacgcctgtaatcccaatactttgggaggccgaggcgggcggattgcctgagcttaggagttcaagactagcctgggcaacaaggtgaaaccccgtctctactaaaatacaaaaaaattagctgggcgtggtggcattcacctgtagtcccagctacttgggaggctgaggcaggagaattgcttgaacccgggaggcggaggttgcagtgagctgagatcgcaccactgcactccagcctgggcgacagagcgagactccgtctcaaaaaaaaaaaaaaaaaaaaaaaggccgggcgcggtgggtcatgcctgtaatcccagcactttgggaggcggaggcgggtggatcacgaggtcaggagatcgagaccatcctggttaacacggtgaaaccccgtctgtactaaaaatacaaaaaaattagccaggtgtggtggcaggcgcctgtattcccagctacttgggaggctgaggccggagaacggcatggacccggaaggcggagcttgcagtgagccaagatcgcgccactacactccagcttgggcgacagagcgaggctccatctcaaaaaaatgaaaaaaaaattgaagtgaaattcatataacataaattaactattttatagtgaacaattaaagggatttcgttcctgtaaatgttgtgcaaccatcaccccatgtagttccaaaatattttaaccaccccaaattaaaacccatacccatgaaccagttactcccaattccccagtccataagggtacttaattcctttttatggctaactagtattccattgtagggatatactatatttttatctagtttttgaaatttaccgaatttgggttgtttccactttgggcctattatgaacaatactgctatgagcatttgtgtacaagttgttgtgtagacatgttttgaattctctaggagtagaattgctgggtcatatgggaactccattgatctttttgaggaagtcccacactgttttacaaagtggttgaaccgttttacatctccactaacaatgtttgaaggtttcaatttcaccaatatatgttatctgtcccccttgttatacattatagccattatagtaggagtgaaatagtatctctttatggttttgatttatattttcctaatgcctaatgacgttgagcatgttttatatgcttgttggccattcgtacatctttggagaaatgtcttttcaattatttgaccatttttaattggatcgtttgtggttttgctgttgagctttaagaattctttatatattctggatactggatccttatcagatacctgatttgcaaatgtttcctcccattctgtgggtagtcttttcactttcttgataatgtcctttgatgtaaaaatgtttttaattttgagaaagttcaatttatctattttgtctttggttgcttgtgttttggagtcatatctaagaatccgttgccagatccaaggtcatgacgattactcccatgtttgcttctaagagttttacggttttaactctcatattcagattgttgatccatttggagttgattttggcatatggtgtatgttaagggtccaacttcattctttggcgtgtggatagcccctcgttccagcaccacttgttgaagagacgattttttcctcttggcagccttctgaaaaatcagttgattatagatttataggtttagttctggactctgaattttattctggtctacgtgtctatctctatgctggtaccacattctttggattactgcagctttatagcaagtttagaaattggaatgtgtgagtccatcattttcgttcttctttatccatactgttttgcgtattcatggccactaacgactctatataaatttgagagtcagcttttccgtttctgccccaagcccattggaatgttgatagagttggcattgaatctgtagatcactttggaagtgctgccatcttaacaatattagggattccaatctgtgaccaccccatgtctttccatttattaatgtcttctttaatttatttcagtaatgttttgtagttttcagtttacaggtctttaacttccttgggtaaatttatttttagatattttattcttttgtatgctattgcaaatggaatggtttcctttttcttttcatattgttctttgctggtgtatagaagcacagctcatttttacctgttggtctcgtaccctgtaaaattgtgaaattaatttattagctctagtaagattttgtgggctttttggatattctagacatagaatcatgttatctgtaaatagagagagttttactttttactttccgattttcatgccatttatttatccttattgcttaattgctcttgctagaacttccagtacaatattgaatagcagtgatgaaagcaggcatccatgttttagaggaagcttttggtttttcaacattgattataatgttagctgttcatcagctcttcatcatgttaagtaagattcattctgttcctagtttgctgagtgattttattacgacagggttttagattttgtcagatgctttttttgcatcaattgagatatgaaattgtttccctttgtgtattatgttgactgattttcttatgttcaactgtctttagattagtgggatgaaccccactttatagtcattgtgtataatccttataatacgctgttgcatttggtttgctggtattttgtaggagaattttctatctatattcataagcgatattggtctgcagttttcttgtggtgtctttgcctgcccttgggatcatgttactactgaactcctagaatgagttaagaagtattgttgctggaagattttgagaacgattgatgttaattcttctttaaatatttggtagaaattaccagtgaagccatccgttcctagattttttttgttgaaacattttatttttgattttatttttactttaaaaaaagttatgggatacatgtgcagaacgtgcaggtttgttacacaggtatacatgtgccatggtggtttgctgcacctatcaacctgtcaactaggttttaagtggtatttgtctgaatgctctccctcccctttcccccaacccctcgacaggccctggtgtgtgatgctcccctccctgtgtccatgtcttctcattgttcaactcccacttatgtgtgagaacatgcggtgtttagttttctgtccctgtgttagtttgctgaggatgatggttcccaacttcatccatgtccctgcaaaggacatgaactcattcttttttatggctgcatagtattccatggtgtgtatgtgccacattttatttatccagtctatcattgatgggcatttgggttggttccaagtctttgttattgtaaatagtgctgcaataaacatacatgtgcatgtgtctttatagtagaatgacttataatcctttgggtatatacccagtaatgggattgctgggtcaaatggtatttctggttctagatccttgaggaattgccacactgtcttccacaatggttgaactaattaacactcccaccaacagtgtaaaagtgtttctatttcttcacatcctcaccagcatctgttgtttccatacattttaatgattgccattctaactggcttgagatggtatctcattgtggtttttatttgcatttctctaatgaccagtgatgatgagcttcttttcatatgtttgggggcctcataaatggcttctttacagaagtgtctgttcctatcctacacccactttttaatggggttgtttatttatttcttgtaaatttgtttaagctccttgtagattctggttattagacctttgtcagatggatagattgcaaaaattttctcccattctataggttgcctgttcactctgatgatagtttcttttgctgagcagaagctctttagtttaattagatcccatttgtcaattttggcttttgttgccattgcttttggtgttttagtcatgaagcctttgcccatgcctctgtcctgaatggtattgcctagattttcttctagggtttttatggttttaggtcttatgtttaagtctttaatccatcttgagtttacttttgcataaggtgtaaggaaggggtccagtttctgcttcctgcatatggctagccagttttcccaacaccatttattaaatagggaatcctttccccattgcttgtttttgtcaggtttgtcaatgatcagatggttgtagaggtggggtgttaattctgaggcctctgttctgttccatttttctatatatctgttttggtaccagtactatgctgttttggttactgtagtcttgtagtatagtttgaagtcaggtagtgtgatgcctccagctttgttctttttgcttaggattgtcttggttacacgggctcttttttggttccatatgaaatttaaagtagtattttctagttctgtgaagaaagccaatggtatcttgatgggaatagcaacgagtctataaattactttgggcagtatggccattttcacgatactgattcttcttatcaatgaacatggaattttttttccatttgtttgtgtcgtctcttatttccttgagcaatggtttgtcgttctccttgaagaggtccttcatgtcccttgtaagttgtgttcctatgtattttattttctttgtagcaattgtgaatgggagttcactcatgatttggctctgtgcttttctattcttggtgtataggaatgcttgttatttttgcacattgattttgtatcctgagactttgctgaagttgtttatcagcttaaggagttttggggctgagacgatggggttttctaaatatataaaatcatgtcatctgcaaacagagacaatttgacttcctctcttcctatttgaatacactttatttctttctctggcatgattgctttggccagaacttccaatactatgttgaataggagtggtgagagagggcatccttgtcttgtgccggttttcaaagggaatgcttccagcttttgcccattcagtatgatgttggctatgggtttgtcataaatagctcttattattttgtgatgctgagaagaatgtatattctgttgatttggggtagagtcttctataggtgtctgttaggtctgcttggtccagagctgagttcaagtcctgaatatccttgttaattttctatctcgttgatctgtctaatattgacagtgggttgttaaagtctcccactattattgtgtgggagtctgtctttttgtaggtctgtaggaatttgttttatgaatctgagtgctcctgtattgggtgcatatgtatttaggataattagctcttctttttgcattgattccctttaccattatgtaatgcccttctttgtcttttttgatttaaatttgttttatcagagactaggattggttttttttttctttctatttgcttggtgaaatttctccatccctttattttgagactgtgtatgtctttgcatgtgagatgggtctcctgaatacaggacaccaatgggtcttggctctatccaatttgccagtctctgtattgtaattggggcatttagccgatttacatttaaggttaatattgttatgtgtgaatttgatcctgtcatcatgatgctagctgttttgcacattagttgatgcagtttcttcatagtgtcattggtctttgtattttggcgtgtttttgcagtggctggtactggtttttcctttccatatttagtgcttccttcaggtactcttgtaaggcaggcctggtggtgacagaatcccttaggatttgcttgtctgtaaggattttatttctccttcgcttatgaagcttagtttggctggatatgaaattctgggttgaaaattcttttctttaagaatattaaatattggccccactctattctggcttgtagggtttctgcagagagatctgctgttagtctgatgggcttccctttgtaggtaacctgacctttctgtcttgctgctcttaacattttttccttcatttcaaccttggtgagtctgatgattatgtgccttggggttgctcttctcgaggagtatctttgtggtgttctatttcctgaatttgaatgttggcctgtcttgctaggttaggggaagttctcctggataacatcctgaagtgtgttttccaactttgttccattctccccgtcactttcagggacctcaatcaaacgtaggttttgtcttttcacatagtcccatatttcttggaggcttttttcattccttttcaatcttttttctctaatcttgtcttcacgccttatttcattaagttgatcttcaatccctaatatcctttcttcttcttgattgatttggctattgatacttgtgtatgcttcacgaagttctcgtgctgtgtttttcagctccatcagttcatttatgttcttctctaaactggttattctagttagcagttcctgtaaccttttgtcaagattcttagcttccttgcattagattagaacatgctcctttagctcagaggagtttgttattacccaccttctgaagcctactttgtcaaacccattctctatccagttttctgcccttgccggagaggagttgtgatcatttggaggcgaagaggcattctggtttttggaattttcagcatttttgcactgttttttcctcatttttgtggatttatctacctttgatctttgaggctgaagaactttggatgggatttctgtgtgggggttctttttgctgatgttgatgttactgctttccatttgttaggttttcttctaacagtcaggcccctctgtggcaggtctgctctagtttgctggaggttcaccccagaccctgttttcctggttatcaccagtggaggctgcagaacagcaaagattgctttctgctcctttctctggaagcttcatctcagaggggcaccagcctgatgccagccagagctctcctgtatgaggctcctgtcaccccctgttgggaggtctctcccagtcaggaggcacaggggtcagggacccacttgaggatgcagtctgtcccttagcagagctcgagtgctgtgcttgtagaaccctccttgtcagggtccactgctctcttcagaagtggcaggcaggaacgtttaagtctgctgaagctgcgccgacagccgcccctttcctcgggtgctctgtcccagtgagacgggagttatatctttaagcccttgactggggttgctgcctttctttcagagatgccctgcccagtgaagaggaatctagagaggctgtctggacacagctgttttgccacactgtgttgagttccacccagtccttagcacagtcaggggaaagccgcctactcaagcctcagtaatggtggatgtccctccccacaccaagctcaattgtcccaggtcgacttcagactgctgtgctggcagggagaaattcaagccagtcattcttagcttcctgggctctgtgggagttggacccactggcttggctccctggcttcagccccctttccaggggagtgaacagttctgtctcactggggttccaggtgccactgggctaagaaaaaaaaaaaaaaaacaaaagctcctgcagctagctccgtgtctgtctgaacagctgccagttttgtgcttgaaacccagggccctggtggtgtaggcacatgagggaatctcctggtctgtggactgcaaaaaccatagaaaaagcatagtatctgggccagatagcacagtctgtcacagcttcgcttggctgggaaagggatgcctctgctccttgcacttcccaggtaaggcgacaccccaccctgcttctactcaccctccgtgggcttcacccactgcctaaccagtcccaatgagatgaacagggtacctcagttggaaatgcagaaatcacccaacttctgcattggtcttgctgggagctgcagaccagagctgttccttttcggccatcttgccagcagatgcccctgtttttgtatttttatattgatatatcatagttgtatgtatttttggggtatatgtgatattttaatatgtatatacaatgtgtagtgatcaaatccaggtaattgagatatccattacctcaaaaatttatctttgtgttgggaacattccaattcttctcttctagctactttgaaatataaaacaaattattattaactataatttctctgttacaagggaggttttgtttagtgtttcaatctctttatttgttataggtattctttgaaaggtcttccctccttaacctcccttcacaaagtactacatttcctttcccttctttcagaaatgactttctctcataggtgactttcctccctcatctctcccaagaccttcttttcagtacctccatcacatgggactaaccttcttcaccacaccgctgaaaccactaacctccatcatctcctctcttaaagcttttccacccctaacctcacttgctaacctcccttacttcaccacacatttcctcaatctcctcccttcacaaaagtctttccttgctcatttcccctcatgaaagcctttctttactcaccttccatcacagagtcctaccctcccgcatgttcactcacaaatgctttcttttatctctctctaaaggcttcctaccacacttctgaaaaagtgcttacttttctcacctcagtcgtggaggcctttaattcctcaactcttcactaaaattccttgtcttccttcacaaagacctttctccctcatctcctctcacaagggcctttcttctttcacctccctcatgaaataataacctccttcatctcctcttcatagtcctttcttatctcaccagtacattccctgcctcacctttgcttatatagttccaacctcccttatctctcctcacaaaggtataccctccatcttctcctctaccaaaatcttctttccatgctctcccctaacaaaattctaacctctttcacctcccctcacaaagacctaatcttctttcatggttacctttcctgctttctttaccttcacaattgacttccttccctgctcaaaggcctccttccctcaagtcccctcacaaaaccctaactttctcacctcctttcccaaaaaacttccttccttcacttatcatcacaaaggccttccttctttttttttttttttttaatttatttttttattgataattcttgggtgtttctcacagagggggatttggcagggtcatgggacaatagtggagggaaggtcagcagataaacaagtgaacaaaggtctctggttttcctaggcagaggaccctgcggccttcagcagtgtttgtgtccctgattacttgagattagggattggtgatgactcttaacgagcatgctgccttcaagcatctgtttaacaaagcacatcttgcaccgcccttaatccatttaaccctgagtggacacagcacatgtttcagagagcacagggttgggggcaaggtcacagatcaacaggatcccaaggcagaggaatttctcccagtgcagaacaaaatgaaaagtctcccatgtctacttccttccacacagacacggcaactatctgacttctcaatcccttccccacctttcccgcctttctactccacaaagctgccattgtcatcccgtcccgttctcaatgagctgttgggcacacctcccagacggggtggtggccgggcagaggggctcctcacttcccagtaggggtggctgggcagaggcgcccctcacctcccggacggggcggctggccgggcaggggggctgaccccccccacctccctcccagagggggcggctggccgggcagggggctgaccccccacctccctcccggacggggcggctggctgggcagaggggctcctcacttcccagtaggggccgccgggcagaggcacccctcacctcccagacggggcggctggccgggcggagtgctgacccccccacctccctcccggacggggcagctggccgggcggggggctgaccccccccacctccctcccggacggggtggctgccgggcggagacgctcctcacttcccagatggggtggctgccgggcggagaggctcctcacttctcagacggggcagctgccgggcggaggggctcctcacttctcagacggggtggttgccaggcagagggtctcctcacttctcagacggggcggccgggcagagacgctcctcacctcccagacagggtctcggccgggcagaggcgctcctcacatcccagatggggtggcggggcagaggcgctccccacatctcagatgatgggtggccgggcagagacgctcctcacttcctagatgtgatggcggctgggaagaggcgctcctcacttcctagatgggatggcggccgggcggagatgctcctcactttccaggctgggcagccaggcagaggggctcctcacatcccagacaatgggcggccaggcagagacactcctcacttcccagacggggtggcggccgggcagaggctgcaatctcggcactttgggaggccaaggcaggcggctgggaggtgtaggttgtagtgagccgagatcacgccactgcactccagcctgggcaccattgagcactgagtgaacgagactccgtctgcaattccggcacctcgggaggccgaggttggcggatcactcgcggccaggggctggagaccggcccggccaacacagcgaaaccccgtctccaccaaaaccagtcaggcgtggcggcgcgtgcctgcaatcgcaggcattcggcagactgaggcaggagaatcaggcagggaggttgcagtgagccgagatggcagcagtacagtccagcttcggttccgcatgagagggagaccgtggggagagggagagggagaggggccttccttcttttaccctcacaaatgccttccctccttcatcaccattccaaaagtttttcttgtccttcaatcaaggtcctttcatttctcacctccccacaatgactttcctttgctcacttcacaggccttttctcaaaagcttttcattccttatctcacagagcccttttctcctctcttaaagtcttcagtcccttacttcccttcttttaccttatatcatcctctccctctctaagctaccttcactaaggccttcccctctccctcaaattccttctcttacctctttatttaccctcctccaggccttcactcactccctctcagaagcctactttcagctctccaaaagttcttctccccactcaggttttccttccttcaccacccaaaggtactttccacttcttccccaaaagccttcttttcttccttccacttaatggtctttctgcctcacttgcttcactcaaagtctttccctcctcctccagattctcccaacctgaactgcttttccttttcctacaaccttctttccttccataaccttcctaagtctcagatggttttctcaaaacagctttctcaatattacccataatggcgtgccttttctcccaaccccctcacaaacgtattttatgttctcatctgcacaaaggccttagatttcccacagtctcctgcctttgagctccagacccaagcccaaagacttcagcatccccacctctaatcccaagggcttctttctccctgctctccctagaggttttccgtcttctcaaccaaggtccacccacagtcaaagagggaggcaaagattgggcagtggcatcacaactaaaaagaatagagacttctatacactatgtcacaactacatgggtttctaggtttttgtgaggaatgaaattcataattaaataaagtatatgctgttttatcaattatttgaaataagttagaaaatatgatttctgttctttgaaaaaatgttaagatatttttaatgatcatttacaaatcataatattactacaaattattcaggtttatttctactatttatctaaaacaccaaagtatttctgaattactgtatttgtaatagtacaatactaaaagtcttcttatcctctaaaaaagtaagctgaaaaacaaaactataaattgtgtattttttcttagtcagcgagttcttcattttctatttctattttgagtagaactcccacacaaaaaagaatactgtctaattcagtgtgatttctttatttccaggagtactttttccattataggtctaacatgttttctcctaaaataatctatgattcattctttacattgttagatttcccagattctcaggaggtaatatgtgactgtatgaattaaatttaatttgcatttaaaattatttcacttaattaacataacaaaatgcacttgttatgggttgaattgtgttccctcaccaaaaacagttgcaattataaccccaataccttatttgtgatcttgtttggagataaggtcttcatagagataatcaagttaaaatgaggtcatctgaagtgtattttaatccactatgaatggtgtccttataaaaaggggaaacttggatgcagagacagacacccatacaggaaagactatttcaacctgcaagccaaggagaggcgtttcctcacaatcctcagaaggaaccagccctactaacaccttggttttggacttctagcctccagaggtgtgagacaataaatttctgttttaagccacccagtttatggtatgttgttacaacagccctaggaaactaatatacatcagaaggtaaaataattgtccatggtcctgtagaattatggcaaaagcaaaacatatggttctgacattaaaattccctttctcatttctagacggaccctagtgagttctcttagatttaatggtactgacaggaattgaagttgagtgacctgaggtaactctgggatatacctccagtttgtattgtcatttgcattcccaagccacattgcctttcaagttatatttatgcagaagacgtacagaccagtggcatacaggataaggagagaagcaaactgtggactgggagtttgattccaccaataatctgtaacctattcagtcagtcctaattgctcatccttttcagggaaatttaaaaaatgagaaataaagatggactagtaggtaatattttcaaattgccttagctgcatggacagatctcagtaactagtttctgtatcattatattagaatactttatttatctgatatccttggggagtgaatgaggcattacacatagaaagtctggctgcctgccgtgtacctaattgagcacgaggctagcttttgctttaaccctgtgtacgtgtggtgtagttggaggagccctaagctaggaatcaagagatctaggttgccctgattgttcacactaacttgctgtgtgaccattgatgagtcattttacctctttaggcttcagttatcttatcgaaaaaatgaagaaatttcactaggtgggcatttttcctgttcagtcaaaatgcttggttatcttaatgataccagtcattcatattttcctttaagctaccttacttttttacattaatatatttatttaaaaagggaactgtaccatagttataaatggaaagttgaccatatttgctattaagaaagttattaataaaaataaatatcctgaaaacaagtaatgatattaaatttaaaattgtaagcaataaaaataaacgatgaaagacatgtaacaaactgttttgcattgtattaagcccttcacatgtgacttcatttaatcctcataacacttcaaaataaatatcaccattttgcagatgagtaaactgaggcaacgagaagtttactgacatgctcaagttcaccacctagtatgtggcagagtcaggatacaaactcaggtctgtttgaggccaacacccagaaagatagtggcataggtagaccctcaacttgaagcctcagtaaaatcctttagaaactgatacagttagccactgctctttctgtctcctcaccctgtcattcagtttctcatctattagacctcacaccacagcggggatggggggggcgggggcaacataatttgtaaaatgaaaatacaagatctctcatttaaaattcatggttttcaaaatggcgatagcaaaacattaaaccaagcatggagctccccaagtgtggggccctgtttgactgcacaagtcacatatagatgaagctctctgtctgcactgagtctggtgtttcttttccgttgaaatgtagttagatttttagtcttttatttgtaacagggaaattaaaaaataaaaaattctttgtgacaaggaaacataattcgttctttaatattttctgctaccaatttaaaaggctgactcctaatcttttatttgctgaacatgctaatgagtgtaaagatgcaaattagaggcaaagaggatgacattattcttcatatgaaaaataatggaggaggggaaaaaggctggaggctgtttgggtagagaggaagacctgagaaaaaggcttgtgtgctagctggtgggagactttggagagagttaaagaggaaaaggaggcaattgtcccagggaagaaagagcagggacaaaagtttataaagcctaagcaaaaagaacaaagctggaggcatcacactacctgacttcaaactatactacaaggctatagtaaccaaaacagcatggtactggtaccaaaacagacatacagaccaatggagaagaacagaggcctcagaaataatgccacacatctacaaccatctgatctttgacaaacctgtcaaatacaagcaatggggaaaggatttcctatttaataaagggtattggaaaaactggctagccatatgcaggaaacagaaattggaccccttccttataccttatacaaaaactaactcaagatggattaaacacttatgtgtaagacctaaaaccataaaaaccctagaagaaaacctagacagttccattcaggacaatggcatgggcaaagacttcatgactaaaacaccaaaagcaatggcaacaaaagccaaaattgacaaatgggatctaattaaactaaagagcttctactcagtaaaagaaactatcatcggagtgaactggcaacctatagaatgggagaaaatttttgcaatctatccatctgacaaaaggctaatatccagaatctacaaggagcttaaacaaatttacaagagaaaaaaaaaccatcaaaaagtgggcaaaggatatgaacagacacttctcaaaagaagacatttatgaggccaaaaaacatatgaaaaaaaactcatcatcactggtcattagagaaatgcaaataaaaaccacaatgagataccatctctcgcctgttagaatggcaatcattaaaatgtgtggaaacaacagatgatggagaggatgtggagaaacaggaacgcttttacactgttgatgggagtataaattagttcaaccattgtggaagacagtgtggcaattcctcaagtatctagaaccagaaataccatttgacctagcaatcccattactgggtatatacccaaaggattataaatcattctagtataaagacacatgcacacgtatgtttattgcagcactatttacaatagcaaagacttggaaccaacccaaatgcccatcaatgatagactggataaagaaaatatggcacatatacatcatggaatactatgcagccataaaaaagaatgagttcatgtcctttgcagggacatggatgaggcttgaaaccatcattctcagcaaactaacacagggacagaaaactaaacaccgcatgttctcacacataagtgggagttgaacaatgagaacatatggacacagggagaggaacatcacacaccagggcctgtcagggggtggggggctagaggagggagagcattaggagaaatacctaatgtagatgacgggttgatgggtgcagcaaaccaccatggcccatgtatacctatgtaacaaacctgcacattctgcacatgtatcccagaactcaaagtatcaaaaaagacaaagtttataaagatttgccctatggcaagtgatgtcagccgtgtttggtgtcatggtaggtttgatatgttactcatttttttcttttacactttcaaataaactcatagcaaacattaatatatccataaatattcatctatgttccacctaaaattcttatgtactactagtgatagactacactttgagacatactgctcaaattaatttaaaaataattttctttcagagtacggaagaaaccaaaggtggagggcagggtaaaatatattctagacttatggttgagactgccactgatgttgctcatcttagttaagatgtttaattgtcgctttcatttcaatgcccattgtaatgaccgaaagatctataaagggtgaaaacctggagaacctagaaagtttccatctggcatctatatgccagaaacttggagggttctctgaaagataaaaacatgatggagagaaatcacagcaacttgtgtttcatgtcaagccaagggcaagcctgtccagcagggtctggaggctagggcactctgagttggggactctaagttgggggatcaatattctagaggaattccagagagcacataacttgctgaatataacttaggatggagacttgggcctcagtgtgctactgtcagccaacacttacttcagatggtgtgctgaatcgagtggcaacaaggacagcaaattgacgaaggggaacactgagcaaacaaacagcaatatggaactaaagtcttgtcaaggtcccttccatctgtagctcccttctcatgtcatgtaggacagagggttctctgatctggcaaaatgtgcctagcaacattaatctcatttcttgtccttgtgctggaagcactctcccaggccctttgttcagccagctacttctagtcttttttttttttccacttaaatatcatctcctcagagagactggctcccatttaaagtagcccccctcctttattctgtatcagtatccacttttcttcatagcactcattacaatttgtaattacttaatttgttagtggtctgtcttctccactgcattgtagtaagctccatgagggcagggatcttgtctgacttgttcactgatatatcctcaaaacacagaatatagtgggtgttcaataatgagtaagcattagtagaaaacaagcaggacaaaatggattatgtttaatattgtcaaggtgtaatatatagtgaagataaaattgtcatgattgaatatgcactattggaatatatgaaacaaatagttttagaaatttaagtagaaatcgtcaaaaccacaatcatggtgagatactttaatatttatcttttagtccttgacagaaaaataaagatacagagcatttgcataatataatttagcttgatttaacatttataatagagttcattgtgagagtacacattcaaatgtatgtgtatggaagttgctctcattaaaatgagaaagaagatattatcattgatataaaggagatttaaatattacaagtgaatagtcttatgattccatgctaataattgctttgtaaatagatgatttcctagcaaaataaaaataacaaaattaactgtgaccatgaagaagcaaaagataaagaactacccctctccaaaaaatgaagactcagactttttctggatgagttttcccaaacctttaatggatcaaatcattcctatattgtttcatctgttttagtctagaaaagcaacaggaagcttcctaggttattttatgaatgaaacaggtataactcttatgccaaaatttacagatgtagcacacaaaagaaaactgcagacacacttcacttaggaatgttgaatcatgaatcctatataaaacattagcacttgtggactttgttcaagaatgcaagaatattttaatattggcaaatatattaataacattcaataattaataggcagggggaaatatcatcatggcagtaaatattaaaaggatttgatagaatcccagttctatccctgattcaaaatgaaacaaaataacaacagaaaatttgtagaaaactaaaactagagaaatacatccttaatttaataaagggtatctatcttacaccagcagccaacattatacttcattatgaaatattagcacattcccattaaagtcaggaatgactcaagaacgcccattattatggttattaatcaacatagtttaaacatttctaggcaatacagtgaaagaagaaaaataattcaggtgttaatattgtaaagaaaggagacaaagtcatctatatttagtgataatattattgtctatctggaatgaaactgaagaacaatgagaactaacgagagttaactaagggaggaagaaaatatatgtataaaaatcaatagctctcttacataccatcaatccactagaaaatgtggtgaaatggattatgttcacaaaacaacaaaatatatatgatgcctgggaataaatgtactaagaaaagtgcagggcctatctgaatacaatgataaaccttattcagggacataaaaagagacttgaatgaacagagaaacaaaactacttaggtgaaaaaattttgtaacattatcaattctctccaaatgagtctacatttaattgaattcatgcctagcacgtgggacacacaataaatgatttttgaatgaatgataaataagtgaacataattaccataaaatttagaattttttttgacttgacaaaacgattttaaggttcatctaaaaaattctcagagctgaaaataaaatttgatagtagagacaatgaaaggattaccagatcagttattaaaacataatgacataagataggccgggtgcagtggcttacggaggcctagacaggtggatcacgataccagcctgggaaacatggtgaaaccccgtctctactaaaaatacaaaaattagttgagcgtgatggtgcatgcctgtaatctcagctactcgggaggccaaggcacaagaatcacttgaaccaggaaggcggaggttgcagtgagctgagattgcgccattgcactccagcctgggcaacagagcgatactctgtctcaaaaaaaaaataaaagaaaagataaaataaacaataacattagtattggcacatgaatagataggttggtggaacagaatagaaagtcaagaagcagatctatgactataaggatatagtaaggatttagaatgtgatgatgttatcttaagtataacagaaaaggatggatttaataaagggccttatgactgctggaaaaatcgtatccctactccacaacacactccaaaatatactccaggtgtattaaatatttaaatttaaaaagtacaaccatgaaaatgttgggagtattagagtatagaatgcctttatagaggtaaaaataataaaggaagagattgatagatttaattacatataacattttaagcttctgagcttcccaaacaccataaaaaagtaaggataaccaattaccttgaaaaaaatattttaaatatgtggcagattaagagttaagttctctactatgcaacacaatatgaaatatgtaagctcactgattatgaaagttgcaaattaaaacaaaagatattttgttttattttggccatcaaattggcaaataataaaaaatggagaggtgtcagaaaactggcacttgcctgtactactggtagaagtgtattttagggttgccctgctggagggtaatttggacatactcaagagccaccatgccttaagaatttatcttaagtaatttttcatgaatatttgcaaatatataaatataaagcttcagtgataatcattgcaagctaacgataatgtaatgataatcattgcagtgttctttataacatcaataaattgtaaacagcctaaatgttttcctatggagaaattgctaactgagttataatagagccatataatggaattctgtgacattattaaagatagttttgggaaatatttaatgctatggacaaatctgtgttatcctcttctctcatgtaggagggaattgtgtaaataagactaaaaaccagttctttaaaatagtgagaaagaaggataaggaaggttttactgtatgtaaggccttgatttttgtcaatatatatgtaagccaacatattttccaagactttctgtgatgggatctgatttagttggaatacatactgttttcagctcatcagttgattaggcctcttaatgccatttgtcagaggcaagtttactattgtaaatcagcttacaacaatggcatgtgtcagcctatagcttaagcatttgtaaatttaacactttttcagtttcacaacaaaattgcattctgattattaatgatgcttaagctgttatgagatgaaagtatatctgttagctatttgacattctataattaatttaagcaaaggtaattaccattcaagggtcattgaaagtgataaatgctttatatgttgggattaataattttacttcttcttaagggtcctcatattttgtgcttgcaaatggacatatcctgcccaacagtgaaaatgctcatggccaatctctggaagaagattccgcattggaagctttgctgaattttttctttccaacaagtaagttcttgtttgatttttttccccctctaatgttcttgttttgaaaacagtaattaaatgtttaggaagcagtgtggtgtaatggcactggagtgggacagagctgagtttgaatcctggctctgctctttggcttaggcaagacaatctctctgaacctcagtgccctcatctttgaaatgaagatatttaccacaaagaattatgaggatgaactgagataatattcataaggcatttcataaatgtttgttactgtttataaaatacttttccttcgcaaatatctaatctttcacaatttgcctgaatggcattgcctgaaattcagtcactgacccagtattgtgaaattgatgtcttctgtggcattagtgagggtactgtgtgactgatgttatggaatatgccagatgttttcccatctgttttaatgatagaaatcccaggtttcaagtctcactgtctttttgtgattctgtatataatgtgtttatcaagcacattatgacccctgagaattattaaccacaaataaacacgtttcattttgtatagcatgtggtgccctttcaaggagaagcttcatataaattggaatatgtgaagtacaaagataaagctcttatgaaaaatcatgcagaatttattctaacaaaatttgatatactctataagcacaaaattatatctgttctttgattccaggcctttccactgaattctttagtgaacttgaaaaaatctctttatgtttctttatacttgttacattaagtttaaaacaggcatctaccaatgagaatagcaaaataaacaagttccttaaataaactcaaaatactgccatggtcaaattgagtaaataaaaaagaaatctgagacggtgttatgtcgtataggctgaaagaatggtttgagtgccacagttagtcgtaaacaacaactaatgatgatttaagctttaaagcttatgaaaacaacagatgtaaacagtcacatacttacctgtaataactacattgtacagacactgaagccacctgtaaaaatggttcgaaaaagatatctgcatttcccaaatatttctccaacctggtgcaggaaagtaagtcaaaatcaattatatgaagtaaaaattttgtccaacaaaataaaattgttccattttaatagaaacatctgacctaggttgattcaaaaagtgattaaatatttatcaaatgtacatactgtctttgaagacaataactacagcttcataaaacgtgaaatatttttaaccaatttatttcttcccccacataattgaaaataaacactcttaccacttaagcatgaaaaaaaagttcgttgttttgccattaggctactatttgtaaaatatttatctcttgcagattaaaatgacaaccttgatacacactggcagggaagcttgagagatcacctgatctttctccctttggacaaaattacatacttaaacctgacaaaaaaaaattgttctacctttttgattctttaaaattaccaatgcctcttagtaatttgagcttgaaagttaatttgtttttgtttttttgagacagagtctcgctctgttgccaggctggagtgcagtggcacaatctcggctcactgcaacctctgcttcccaggttcaagcaattctcctacctcagcctcctgagtagctgggactacaggcacatgccaccacgcccagctaatttttgtatttttagtagagacaggttttcaccatgttggccaggacggtctcgatctcttgacctcgtgatccgcccgccttgggctcccaaagtgctgggattacaggcactagccatcgtgcctggcctgtgttaattttaatatctagcataaagtccatcagatgcacttaaagcagaaattaacagatgatcttagagatcatatagtctagtctcttctacgatttaaccctaaccctaaccctctctttagcatttctgggaagtggtgtttgaacagtacccatggtgagaaactcagcatgcaaggaaatccatcccatctctgagtagtcctgactattgtcaccattttctgggtgtttgacacccagaactgaacacttgatgcaatccaacctaggggagaagagccgctctgggcctagcagaattgaagaacagattacttagaatatagaacaacaagtaggataaactctcatgtctaaaatgtttggaaaatgagtgtctaggccagttggtagtgcattaaatttttgatcttgcataagttactttgatcctttattatttttaaaacagagattgtaaaactcaatttgggagtttgttgcaaagattagtaataaagtgtgtaaagcaaggttcctggcccaaacaggtgcctaaataatggtagatattattatttttaccttggcttcagcaattgccaatctttaaaaaagaggaatgtagtaaaatatactgaggttaaaatttgcataaaacaattacgttgttctttgctgatgttgaagtgctttagtgattataaaatatcagttactacttttaagtttgtaattgttgatagtataagagattgaaccgaatctattctggccttaacacatagacatactgtggaggtttttctttttgaatgaaaatctaatattgtgctttttagtttgtatttgtttctcttataaagcaggatattatagaaaataagctatttgagcttgcaggtcttttagattcaggtatgtacgaatttattgcagttgcataatcttggtgttaatgccataaatcattgcctgtttaaaattatagagtcataatttaagggtgaaacgaagaatcttaaaatatattatagtgccaatatgataagtgttcacaaaaagtaggtcaatgccagtgtatcacttactttagtcactagcagcaaactatgtaatttttacttagttctgtggcttagtaacgttaagccggaggatatatgtgggatcattttaacaagggattagttttaaaagcatttgacttgttgttatttagttccttctgtgttatatttgcatcatcaccactcagcacatgatttattgtccttttaaactatcttaccaaagattttttaacaacttgtaattttctgcaattcacctagatttgaaaatgtgatattaaataacttagtggtaacttttagcttaagtcttattttcttttagcacccatcattagctgtatatgccattaaatgtttgcttttcttctttgtcttccagtaattatttaattagggaaagtggtaactaaccatgctgaattctctttcttaaatttctgtttttaaaagcttgcaatctgagggaaaatcaggtggcaaagccttgtaatgagctgcaagatcttagtgagagtgaatgtttgagacacaaatgctgtttttcatcatcggggaccacgagcttcaaatgttttgctccatttagagatggtaagttattcctctttcatttatttctattttttaatattaaataaacagatcgcagtggcataagttcatatttggatttcctagcttaatacttaaatgggactcccagtcctagagcggtgctccttagaaggtcctgaggtggtcatgactctggtcaggagcagtttttgcttagcctttggatggtgactttggtaatacaaaaattagtctcacattttcttttgctttagtcactctctgtgttttgtccaaaagtttccaggctctatggaaccctcaatggctgagagaagataccggttgggcatgccttagcttacttctctttgcccagcttttcctcctaggtagaattcttcccatttgtcttgtcttcatctcagtatgtaacagtagacttgaatgtttcttgttaaggtctgcttattagtttttctttattgggtattttttgagatagcatctcactctgttacccaggctggagtacagtggtgacgtgatcacagctgactgcagcctcgacatccggggctcaagtgatccacccgcctcagcttcctgagtagttgggactacagacgtgcaccagcaagcccgactaatttttagtttttttgtagagacaaggtctccctaggcttcccaggctggtctccaactcttgggttccagcagttcttctgcctcggcctcccaaagtgctggaatttataggtgtgagccaccacaccgagtcttgttctatagtttttgaattaggttcttctgaatatttttttctttacaaagttttgagaactacaccatctgtttttgctaccttcatttggatattggggatgtatttccagttgctctcatgatgcatggatttgatatgatgaaacactaatactacaaaaaggatgcatgcaaaataatatcttaagttaatatagtccctattcaatttacggctttttgttgaatatgtagtattaatactggaaactaaaacctgatcgtgaatataatattacaattttaacactgtcacatgttatttgtaattcatttatcagtttggtctttatattatgtatgaagcaacatttggttcttgcagaggaaaaaatttaactgtgacttacaattccccaatcacattagaatgcattttccgatgaatataagactaaaatatgcttatttcacctgcacattcttgattccttgtttaatttaatattttgtaatttggaagtaaacctgcagcatctggttattcccagtctcccatccaagcactaaccaggctagaccttgcttagctcacaagatcagatgagatggggcacattcaggatggtgtgaccatagattaagaagctatttatttaccaagttaacggttcatagattaatgtgctccccaagtgctctaggatatacaacatatggccaagagaaaaagccaatttagggccagaggaagaaatatcgtatgcatcatagtaatcaatgatggtacaaaaaataggatcattttgttaaggcttcattaaggggtacatattgaaagtgtagccttcagttgtatttcaagaacatttcatgaactcctgttccttataaagtagcaaggatatttacctgtcacataagaatacctcctcatttcactttattaactgatagtttctttataaagactttatgaaagaacttggatttacttctcttgcttaagtcatgaaagtaacaggatataattaaaccaacagtgcctaaacagatgatgcaaatgtttgggcttggtgcgatcagccttatcctggtatgtctgcccatttattgccgctctcttttctggaggaggtaggtgaacataaacttttatttgctcgttgctaagtatacatgagtatttgtgtatagacatatttattaatacacttcagaaatacagggattatgtttgggttctttatgttgaaaatatggtagcttgggaaagacctaaaactagagttgccataatatgtttttaaaatgcatgttatcggccaggcacggtggctcacgcctgtaatcccagcactttgggaggccgaggcgggtggatcacttgaggtcaggagttcgagaccagtctgaccaacatggcgaaaccccgtttctattaaaaaaaaatacaaaattagccgggcatggtggtgcacgcctgtaatcccagctacttgggaggcttaggcaagagaattgcttgaacctgggaggcagaggttgcagtgagccaagatcccaccactgcactccagtctcagcaacaagagtgaaaatacgtctcaaaaataaaataaaatgcgtgttattttatttttccatagattttcttcttgcatagtatctgtacattcccttatgaaacaaacccacaattagaaggaaaaataaattagcaagcttggtgtgtgtgcagtgggggtggctattaactgcaaatcagaacagttcctggaagtgttagtttccattgagtcatctgccattggtctttaatgatcatctactattgggtcataaagccttgatctgtcttcaagccaattggaaaacaaatttcttcttagcatcttatacaaaatgccaatggactactagcatgatgcttccaagctttttttttttttttatagctccccacctatggggacagagtgggtatagaggtacagagcacagtcaggactagagtgaggtgagtgaagcacttagagcacaaagttaagggaagcactcactctcaggtttgtgcgcgtgcaaggtcagcattgtcactaccctgagaataagtacctccttaaattctctgataaagacaaggtgcctgttgaaggttaagcatgttttatgtttttattgaagttaatgtggaagtagtagttgagttaccagaatatggtttagatttcgcaagaagagttagactatatacactgccttactttggatgaagatcatcgaagtgattggcagtaggagtggaatttttggcccttccttcttctcttcaaaggttgattttgtattaaaaaaataaaccatgaataacaataaagtaacatttgctagaaattggtggctaggaatataccatgaaatttagagagtttctaggattataagtttggtatgataacttcattatggtccctgtgttatacctctgcaaaggaattttatgggggtgttcaggtcccctggatttttttttctctaaaatgaaatccaaaggattgtcctctgatcctaatatatttccttctttctacatagtacagactgcttgagaaacaatgtgaataagtgtatatattggatactatacattttggtttactatgttttatttatttattttactattttgtgcaagagcagtatgctccttcggtcatcttgagctgactatcatgacccttggagcaggtagcagattcatcttgctgcttagctgaatttccaggaacaatgattgagagtggatgggcactttcagcctattgtggtaggctgattttagaggcaaggagaataattgtgtaagaacggggaaatcccatccctgatatcaaacaaggagccaagtgcaggacatagtcagcttttgcagggcaagatatctccttagaacgatttccttaactcactttctgttctccatttcaaagaataaagagatagataaaatattagggtaggtaaaataaataacccataaaagagaaatagacacagcagtaaaatcaatatgtggtggcttaaaaaggaaaagaaagaagccaaacacaattgtttgtccaaatcagaggtaccaaaagctattatgactatctgcagtaatgtgatttgggcctcttttggaagacctttttttgctctttcatcattggaagatacccttaagctcctcctcctgctaaatcctgtcttaaacattaaataactgagaattcctttaagaaagagctgtcatagctctcctcttggccttcggttgcaagccaaaacaaacaatgttttggtattccccaacctctgcaatttggacagtgccttttttaaggatcacctaaggagccagcaactgacaagagttggagagcttaaaaaatgagaagcactttgggaggccaaggcgggcagatcacgaggtcaggagttcgagaccagcctgaacaacatggtgaaaccctgtctctactaacaatacaaaaattagccgggcatggtgacatgcgcctgtaatcccagctactcaggaggctgaggcaggagaatcgcttgaacccgggaggcggcagttacagtgagccgagatcgcgtcactgcactctagcctgggcgacagagtgagactccatctcaaaaaaaacaaaaacaaaaacaaaaaaaaaatgtgaagcaatttgagttggtgggagaactaaaagcagtgtaggtgaaaagggtaattatgcaccagagccatatgtacttcagtttttggcgcctaagtcattttttccactattgaccatattcattgaatgtttgcctgtgccgggtataacggaggatacagaaatttttaagatataggccctacttttaaggagcttaaatccaccttaaaacaaatcccaagtatgacacatttaaattacaatataagacgaaaataattaaggactaaaatggatggtagcaataacttacaaaagttttgaagcagtggagatcaggttaagtaggagagggcacgtcaggcttcatggtagaggtgccgtttcaggtcgattttgaagggggacagatttggagtagatagagaggggtccttttcacagaattaattacattcagatggtggtcttctcactatagacaccttaatttatttcatttcctagcagatacagcttaattttgccactgaaaaaatctataactgaatctctagtttacttctacttgacttgagttctagtgtgatatgaacctggtacacagaggactcaagccggtttgaactggttgcacatacaaaaggaagcagagagcattagtgaaaaactttctaagaattcactaatagccatattaaactaacatataagatgtgtttttgaaatttattgtgtccttaaggttatgtaagatctatttttatcctcaatagggatcagaagcttcattaggtataagtgtcactagtaggcttaagcctttgcttagaggagaaggaaggaaaagatcaagtggatagcgacaaaaggaagcaggggagaggaattctaaggggaagagaaaaagggaggtggctgaattgttcttattaacagctattactgtagccagcgacagtagtctcaagtgcagtttctaattcagtttctaatctttatctgtttttagataaagtttaaatctgtgtgtatatgccatttaaacatctgtggattatatagtgatatgatacttgagtgtgtctgtagctttggtaaggtggaaaatttaaacataataccatgcctgttaaattcagatgaagtgcattttcatgttctttttcttcctatcagattgaatttgtaactttgaattaagacaaaattcagaactcagtctgaaaatgacaaaactgtgttttctttcaactaataaaatgtctatttttttttgaagattgtagatcatctgatacacagatgatgtaaaaagcacatcccccatacactttcaatgttgctacttgccagatggctgttactgaaaatttctacatttagaccaatcctgctgcatgattccctgtattataatctggttttcattatgccgctagtcttagtgccacttattttcttacaatgggaggtaaagaactgggaataaatgtgtcaaaaactgcctaaaaatcatcaccctttgaatttaaaaaatagacatttacattttcaatttcccatgtttgcatatctcattatactgtacaatataattagtaatgttattttgaaaagctttatgcagtaattagcgaactactggaaagtttgaagttcctaggattatatacatctggattcagaggaaggaaataaaatctataaattttgaaaagtatgactaggctgtaagaactttgataaaatatgtcagatgagaatgtgagcaaactggaactctgttctagcatgagtcactataggtttgaaattcgtataaagctggtacttcttggacgctgttcatggtaatttaattactgaaataataagagaacctcattatgcggatcatatgtctgaggtgttctcattgcaaggactccaaggacagcattttagagaactctggcatagtaggtactattaaaaagaacattctgttgccaagtaactaataacttcattgcaaaatgaagtgtccttttctcaattcccatttaatttgatctttttgtcacagagtacactgttgactgctcccttcttgaaattttccccccttggatttcattgttcctcttacaattttgatccatctcagtctgcttttctttgttcacccaaatgtggttgtttcccaaagccttactcccatttatcagaaaatgttagaaatatatagtaggaagaacattctaaaagatctgcgttctcattctgctttcaccacgtttcatggatgtgtttaaattctttgagtattgatttcctaacaaaattatagtagagacttgagttagataatttctatggtattttctgaccatagtattccaagagtctctgggtaaattactcttaattccaaatcctaaaatcttcacctctacctgttccatatttccagtcactctcgtgaattagatgttttatcagcacctcaaatgcaatatgtgaaaaagtgaactcattttctttttctcctaaattatctccccttgacccttctccattcctgtcagtgatttctttagtttcccaggctagaaccttagagtctttggtgactatttcttctcatttatcctcaatatataatcttttcacttactctccttgtcattgtgttctgttttgttttgttcttctttggaatgagtctggaatttgccccttctcccattttattgtaatttagtaccagccttgagtgccttttcccattctaggcaagtggcttcaggagaggagcaaaagggaactaagggtagcatctaaagagcgaaggcaggtttcagagctgagaggtcataatgatatatctaatccaagagattcttataggagagacaccatctgagatggggccgcaagtggggcttggaggatggctaggaggtgggttccagagaggtttcctggtacttaaataggaatgtatagcattggccttaggtaaagaggaattaaggatacctgccaaaccagtttggacatatacctggactcctaatctactctccctctaatccatcctgcaatgtcttgccagactcatcttcctgaaatatctctatttcatttcattatatcattcaagaacttctaatgctttcaagaatatctgtgttccaggccttgtgttaggtgctgtgaaggacaaagaagcaaatcagattatgctctgtgctctcaaggaacacacatagtctgtgtaataagggacatatacaagtatccaaagtagaaaatcattgtccgtaaaagaggtacagataaaaagttagcatgtagatggcttctacggaagtaaacttgggaatttttttttttaagacaagttctcgctctgtcacccaggttggagtgcagtggcacaatcacggcttactgcagcctcgacttcccgggctccggcaatcctcccacctcagcctcccgagtacccaggaccacaggcgtgtgccaccacacccaactaatttttgtatatttggtagaaacagagcttcaccatgttgcccaggctggtctcaaactcctgagctcaaggaatccacctgccttggcctcctgaagtgctgggattacagacagaagccaacatgcccagcccgtgggtcctgggcttttcttttcctgggagagttttattatagccttgctctcgttacttgttattggtctattcgggttttggatttcttcctggttcaatttagttaggttgtatgtgtctagacatttttccatttcttctagattttacaatttattggcatatagttgctcagagtagccactattgaacctttgaatttctatggtatcagttataatgtcttctttttcatctctgattttacttatttgggtattctctcttgtttgcttagtctggctaaaggtttgtgaattttatttatctttcttaaaaaaacaactttttgtttcattaatcttctgtattgttttcttcatttcaaatttatttatttctgctctcatctttattatttttattccctaattgtgggtttggtttgattttgcttttctggttatttaagatgtatcattaggctgtttatgtgaagtttttcctctttttgatataggtacttacagctataatcttccctctgagtactgcttatgttgtatcccaggttttggtatatcatgtttccattatcagttgtttcaagaagggttttaatttccttcttaatctcttcattgattcattggctattcaggaacatattgtttaatttccatgtgtttgtatagtttccaaatttccttttgttattgatttctagttttattccattttggtgagagaagatgcttgttatcgttttaatttttttcaatgttttagggcttgctttgtgacctaacacacagtctatccttgaggataattcatgtgctggggaaagaaagtgtattctgtagggttttctctaaatatctattaggtctatttggtgtacagtgcagattaagtctgatgttactttgttcattttctgtctggaatatctgtccagtgctgacagtagggtattgaagtcactagctattattgtacaggggtctatctctatctttagctctaatactatttgctttatgtatctgggtgttccagtgttgggtgcacatatatttactattgctatattccattgctgaattggcctctatcattatgtggtgactgtctttgtctcttcatatagttttgttttgaaatagatttttttctgatgtaagtatagctactccttccctttcttggtttccattggtatggaatgtcttttttcattcctttattttcagtctatatgtgtctttataggtgaagtgtgtttcttcatatagttttgttttgaaatatatttttttctgatgtaagtatagctactcctgctctgtcttggtttccattggtatggaatgtctttttttcattcctttattttcaagctatatgtgtctttataggtgaagtgtgtttcttgtaggcaactgatgattgggtctcatttttatatccattcagccactctgtgtcttttgattggagagtgtagtccttttatattcagtgttattattgataagtaatgacttacttctgccattttgttatttgttttctggtggccttgtggtcttctccttctactttccttccttcctgtcttcctctagtgaaggtgactttctctggtgatatgatttagtttcttgctttttattttctgtgaatccattgcatgttttttgattagaggttaccatgaggcttgcaaatactatctaataacctattattttaagctgataacaacataacattgtttgcataaacagtcaacaaaaaggcaactaataaaaactctacctcatagtttcatcccccaatttttaaactttttattgtttctgcttgtatcttatagtagtcgatgttttgaagagttgttgcagttaatatttttgattggttcgtctttagtctttccacttaagagtagtttatacaacaaagttactttgttataatattttgtggttttctgcatacttattattgccagtgagttttgtaccttcagatgatttattattggtcattaacacccttttctttctcattaaagtattcaatgtagcattttgtgtaggacagatctggtattgatgaaatcccccagcttttgtttgtctgggaaagtctttatttttcttcatgtctgaaggatattttcgttggacatactgctctagggtgaaagagtagtatgtcgtatttttccttcagcaccttatatatatcatgctactctctcctggccataaggtttctgctggtaactctgctgccagacttactggggctccattgtatgttatttgtttcttttctcttagtgcttttaggatctgttgttcatccttgacctttgggagtttgattattaaatgccttgaggtcatcttcttttggttaaatctgcctggtattctataaccttcttgtacttgtatattgatatctttgtctaggtttgggacatcctctgttattattgctttgaacaaacttttaccccatcaccttctctacctcctttttaaggccactaactcttagatttgtccttttgagactattttctttttttttcttttttttaattttttaaattttattattattatactttaagttttagggtacatgtgcacaatgtgcaggttagttacatatgtatacatgtgccatgctggtgcgctgcacccacattaggtatatctcccaatgctatccctcccccctcccccgaccccaccacagtccccagagtgtgatattccccttcctgtgtccatgtgatctcattgttcaattcccacctatgagtgagaatatgcggtgtttggttttttgttcttgcgatagtttactgagaatgatgatttccaatttcatccatgtccctacaaaggacgtgaactcatcattttttatggctgcatagtattccatggtgtacatgtgccacattttcttaatccagtctatcattgttggacatttgggttggttccaagtctttgctattgtgaatagtgccgcaataaacatacgtgtgcatgtgtctttatagcagcatgatttatagtcctttgggtatatacccagtaatgggatggctgggtcaaatggtatttctagttctagatccctgaggaatcgccacactgacttgcacaagggttgaactagtttacagtcccaccaacagtgtgaaagtgttcctatttctccacatcctctccagcacctgttgtttcctgactttttaatgattgccattctaactggcgtgagagggtatctcattgtggttttgatttgcatttctctgatggccagtgatggtgagcattttttcatgtgtttttttggctgcataaatgtcttcttttgagaagtgtctgttcatgccaagtcaatcctaagccaaaagaacaaagctggaggcatcacactacctgacttcaaactatactacaaggctacagtaaccaaaacagcatggtactggtatcaaaacagagacatagatcaatggaacagaacagagccctcagaagtaacactgcatatctataactatctgatctttgacaaacctgagaaaaacaagcaatggggaaagcattccctatttgataaatggtgctgggaaaactggctagccatatgtagaaagctgaaactggatcccttccttacaccttatacaaaaattaattcaagatggattaaagacttaaacgttagacctaaaaccataaaaaccctagaagaaaacctaggcattaccattcaggacataggcatgggcaaggacttcatgtctaaaacaccaaaagcaatgacaacaaaagacaaaattgacaaatgggatctaattaaactaaagagcttctgcacagcaaaagaaactaccatcagtgtgaacaggcaacctacaaaatgggagaaaattttcgcaacctactcgtctgacaaagggctaatatccagaatctacaatgaactcaaacaaatttacaagaaaaaaacaaacaaccccatcaaaaagtgggtgaaggacatgaacagacaccttttgagactattttctagatgttgtaggcatgtttcattgttttcttttttcttttgtctcctctgaccattttaaatggtattaaatgtattttaaaatagcctatcttcaaggtcactaattgtttattctacttgatcaatctactattaaaaaactctgatgcattcttcagtatgtcagttgcatatttaactccagaatttctgcctgattatttttaattatttcaacctcttttttcagtttgtctgatataattatgcattccttgtctgagttctattgaatttctttgtgtttcctcaaaacagctattttgaattctttgtttgaaagataatatgtctttgtttctccaggattagtttctggtgccttatttagttcatttggtgatttcacattttcctggatggtgttgatgcttgtaaacatttgtctgtgtctgggcattgaagagttaggtattcattgtactgttcactatctgggcttgtttgtacctgtctttcttcggacagctttccaggtgttctaagggacttgagtgttgtgatctaagctgtattcacattaggaggcataccaaatccagtgacactgtgactcttgcagacttgtagaggtacttccttaatgatcttgggaaaaaaaccagaataattctctggattaccatcagaggctcttgttctcttcctttccttttccccaatcaaatggagtctctctctctggactgagctgcctggagctttggggtgaggtgacccaaacaccactgaggccaccaccactgggactgcactagggcagaccttaagccagcacagcactagggcttgtccaaggcccactgtaatcactacctggccactgcttatgtttgctcaaggcactgggactctacaaacagcaggtggcaaagccagccagccttgtatccttcccttcagggtggtgagttcttgcaggccccaggcatgtccaggggtactttccaggagccaagaactagagtcaaaaccttagaaatatacccagtgttctgttgtactgcaggtgatctggcactcaccacaagatgcagttcttcccactgtttcttcccctttctacaggcagaagagccctaccttgtggcaatcaacactgcaggcccacagggagtactgccaatgttctcttaaagcccaagggctcttctatcagcttgtggtgaatgttacctggcctgggactcaccacccttcagggcagtgggctcccctctggcccagggcaggtccagaaatgccatccaacagccaaggcccgggattgggtacactaaaagcccacttggtgctctactcccctgtgactaagctggtatttaaggttcgagacaaaattccctttacttttcccactgcttttctcaagcaggagtctctccctgtagccaccacagctgaggatgtgctgagtcacacctgaattcagcaagtctcaaagtctcacccaaggctcacagcataacctaggtatcactgcttgttattcagggcccaagggattttcagtcagcaggtcctgctaggactggatccttccctttaaggcagtagattgtctcctggttcagggtgtatctagaactgtcatctgtgagctagggcctgaaaaggggacctcttgactctgactggtgccctttcctactgtggctgagctgatatccaagatgtaagacaaagtctgctttactcttccctctcctcttctgaaacagatggaaggagtctcttttggagctatgagttttgcagcctggagttaggggaggggtggcaccaacattcccttagccaccctggctagtgtgtcagtaggttgtgtgcttcctaaatccactgactcttaacccagttcagcactaggactaacctaagaattgcagtccttgtggcctagactgcctttcaaggttattgagggccccagtgaacttttggcccacagtggcaaggcttgccagattcaatcctgactactgggatgggtggttcctctctggctaggtctggtttaaatagtccctctgtgagtgggcatcagctgggttcagcctggttttgctttctgctttgacagggcagctctgagttcaatgtaatgtctcacaattgctgcactctttctctcccaagtgcacagattctctttctgtgccatgcagccactgctgggggataggggagaggcggcattggcaattcaagactgtctttcctactctcttcagtacttctttcagctgtatgaagttaaaagcaagtactctgagtgctcccctgatttttggttcttatgaaggggctttttttttttttttcctgtgtagatagttgttaaatttggtgttcctatggcggggtaggatgggggtaattgttagagcattctgttctgccatcttgctctgtcctcaggccatttctttctttctgatcagttatgttaaactcttgaggttccaaaacacccaacaaatttcttcaatgatgtatgtttttgtttctttgagcccctagcctcagagttccctgatgtactcaatccggaggaattgcccctttactcatccttggccacccagtttcatgcccacatcttgaacattgttattcactcaaaactgaacctctgaatctctgaaatcttaaagttcaaaatcttactctttcaccataggttccttgtcctccagctttttctccgcttcatttttgctgaacctgttctttaacacattgaggcctccagtgtctttaactctctcttttctcccagtctgccatcttcctaacatcatctgctttttttttttttttatccagcctggatcccattgtctagtactttaatccattcttgtttccagtccccttgtttcatggaaactgaatccataccacttctctgctcttagatctaggctcctgggaatttttagaagaaaaaaaatgtcccacaactgtgtggatctgtgtcattaggaatttccagtgagctcacttaacatttccagccatgccactctactagatgtttacaaacaacatgccaccttgtcactctgagtctcataaagtgtatctgctgactgaaatgctcttatgcatctccccacctccacttttctttatctggctctctccactcaggctgcaggcctcatcttagaggtcacctcttctaggaagcttactccaaacctcctgcacacattgggtcaggcttcttcttgtctgccttctaccaacctctgattacctctacttgaactcatctcaacataatattgttagtctgtatatctactttcccttctaaattttaagctcctcaaggacaggtaccatatcttagtcatgtttatgtctctagtacttagaataatgtttatttaataaatgagcaaatatatcagtgagtgaatgagtgtgcaagaaattgaccttttccgtgtgcgtatgctggtcatgatatatgacactttatatgaaaagaagaaaaccacctctaggacactgaaaaatcatttcactcctactctctcccttgggcattttcattgcctattaggtagaatagctaaccttggatctcagtagtaaatgttagtcatatagccagttagtgatgaggctgaacaaaaaccaagtcctctgaaacctaggtcagttttgaaataataaggccgtgttgcttttttgttgttaattaaggtgaaatgtacatgaccaaatttaaaagaaaatctgtagataaagaaaacatagtcattttaattatataaagtaggctatattgacgtcacagcattagaaaaaagcataagttctcaatttcttctctaaaatcctgaaattcaaaaatttctgcaaacctaaaaattttgttgtattcattttgcgacaaacctggactgagattccttctagtcattatttaattcttagagtgaatattcatatatttgttgcagaaatgttactgtgtttgattatgagatgctaccccagaccccatgggaatgtcatgtagtattcaatatatcgtgtcatattacctttctaaatccaaaagaatctgcattctcaagcacatctggccccaaggtactgagaactgtgtagttgtttcagttattattttttttagactgtaggtaacaacatggcaacataaataggccatagataaatcatataaatatattttttgccttcattcaccatttcatttatgcccagagacatttttttgattaattgggaaagaatttgtttctttgccccacatttgtcttacctagtggagctcagtgtcaacccagtaatacagttttaggggagaaaagttagtattatttatcttcaaagtcataatttcaaaggcagacttatctttctctgggacccacatgctcagaaccttgtttttctgtacagctaagtagcacttacaaggtcctggtatcttcttctgcatgctacctagcttgagctgaggataggattatttatctgtcattacctcttcataatattgtgtgcaaatctttctttttttctgtctttggatttttctctttacctctgccatgaacattactattttttttggcttatgtttagttctttagaaagtaaaagccctataagcataaaaatcaacaaacatttccatttcctctgtgggatataaaaagtgataaggtaaggttccagtctgaaggaatttacaagctttgaggagagaatgagacaggttagtgtagtaggagagagattgtactttagatttaggtaggtctggatttgaatcctggttctactactgagtagtttggtgacctcggcaagttactttccgtcttggtgcctcagtttccccatatgaaaaatgggaatgatagaaatagtacctgcctcatcaagtcgttaatgaagattaaatgagatcatgcacgtgaagtgcttattatgcacataggaagtttatcatacctgctgctagccattattcacgaacactgcaaagtggtctaatggaaaaagcttgtactttagagtcaaacagacctacgtttaaattctagcatctccattactagttatctgtgaccttgggtgaattattttacctctttaagccccagattaatcatttgcaaaataggaaacacactatccaccttctagggtcgttatgaggatttaatgagaaagtatataaagcacttagtgaagttcttggcatgtggtagcctctcaagtgcccctttaccaactgtccacacaaatacaaggaggtacgagattgtatacccaatgacaacaggagtaagtgaaggtgctttgaaaattgtaaatgctaatacaatgtgagccattactgtgtagatttgaagttcataggaggaaggaatccctctaaactaggagtggaagagctggcttcctagacaagataatatctaaacttaccattaaagagtgggtaacattgatgtcagcacagggaagtgggagagcatttctgttacagatggtcacataatcaaaatgactgtatagagaataataatgatggttatgatgatcaatatgagcaagccaagtggaataatttctatcggatttattaaatctggtgagttaaaaatatcaggtgggaaagtatagttatctgggcaaatatttttttccttataaccctcccattgttattctatcactaatgagaaataaggtttcacttgaactttttatgttacagcgaaccggccgatgatttacaaaggcaggacaacagagttgtaacgggtttgaagaaacaaagaaggaagcgaaagaggaagtctgaaatgttacagaaagcagcaagaggacgtgaggaacatggtgacgagtagcaagagaccaaaggtaattgacaataggatataaagttgaagtgctcaatctctgattcttgttagctttatatttctaccatcatcttggcttgactgacacattttttttaaccacacaaatgtttggatcacaggagggccagcttctgaacacatatttatcactagagatattgagatggtaggaaaatggataagaaatgtgccaaattgttttgagtgccacattatatggtatacacaggtcagcttttcagagggagaaaagaagttgatcctgcccactctgactctatggctccctgatagacacccttggtaaataatgaaggccacagtcctcatatgtgaccacatcacatatccaggggaaggagaatggccttaggagtctgacagagatgagattgaatcctggatcttacctgttagtctcagctacctgttcttcaaacctgcacgatgtagtgttagaagaggttgagagagggatcccagaatcatacactagggactactttgtacaggttatacttgtacagggttatagatccctagccttgacttgggtctcctcctcccaaaataactgtgaagggacaagtaagaataaaatggttggtgagaaacaaagctgtatctcagggactgggagtaaggagacccaggtcattaactagtagtgtttccatgggcagtgaaattaacctttcagttccttgataccatcatagattttttgtgtaacttaaacaatataatgtatgtgaaaatgttttgaaaattgcaatgcagtacccaaaattatggtattaagttacagagaagcaaaggaatggaatgacaggccattgaattccgtgtcaggagactctggctttagtcccagttctgccattatttacagtgtttgcttgagcaagtcctttaactttcttgggcttcatttcaccaatcttcagaatgagaaggttgatttgatgaataggaaaagtgatttatctcagaagaaaaaaaagaaaatctttatataaggtatcatatatatatatgggatacatatttacttaaggtaacacataaatatgtattactataatgcctgtgtattattattcatataaatatattaccttgtattagtttaatgcaatacatgtgtgcatatgtacacatgtacacacacatatatacatatgtaacattataactagactaacaaaacttggtttctgtggaccattcactgagacatggaagttaactttgttattcagaaattatctctgtaatgatatttgctctaatctgttttatatgtatgcctcacagtaacagaagatgatgtactggcaaactgaaaatacataagttaatcataacattcactatatagaatttgataattttgttgcagggacttcttttatgacaaagtgcgatatgtgaataccagccttttcaagttgtttaaccctactttacttttctcccatagcattattttcccctcaagacaacagaaaccattcagagcagaggggactgtctcagccatgcaaacctcatggagcattttggaaagttaaaaattgattcttatttttgtcatgtttactttcaaacatgaaataaaattgagttctgttttcatgcatcaaaccagaatctgaattctttttattaaaaacagttcctacagaatctttaaaaacatgcctaaaacaccggtggcattcagatcctaaaaagttacatgatttttgcaacttgggttattgtatcaacatatacttctgttggtactaaataagacagatgttccatattgttattcacctgtcagcaagcagagagaaaaaccccaatgatcatatgttgcagtgtgtgatactttgtttattttgaggaaaagaggtgaagataatttgtagggtttttttattttataaattataatgttatttttcccactataaaagtaaaatacacttacaggaaatttggtaaagaagaatatataggataaaggaaaaaatcaaatcataatttcactagtgctaaatactgttaccttgttgtgttttcttttctttttaaataattgtgttctgtgatatatatgaatttattatgctgtttttaaaaattatgtcttatgattcacttttttcttttgaaatatgtgagactcaggtttacctgggcttgttactcattcatgtggcaaacatttattgagttcctgttatgtgccatgcactctgtgtgcttggagatagagtcatgagcaagacagacttggccctgtcttgatggaactcacagtatagctggagaggaagccaggtaaagaagtaatgacagggctatgataagaagagtaccaagttctgtggcagcacataacaggggcaccttgccccagactagtagtcgcttggagaatgagaagaactgaaaggggaggacactcaagtttctcaggattcagttatgatatgaatagattgcaattttgagggaagaagtcttggtttttggtgatcagaaaagaaaaaactcttattacaaaaactttagatagatccaaagctcgcagatataatgagaataaaagagttcctgtcaaacggaggttcataaagacaccatacctgggaaatgtgcacatctccatatgtgctctattgcaggaggcgtcatttgagccaacaaagcacaaagccccacaattgaaaatgcttgctgaaggtaagatccacaacatgtgcattgcaagatttatcaagacagcagtatgattaccttctgaagaagctgtcgagatgtttgatagacaccagacagaaggagacctgttgcagatacccttttgaatcaggagtccaaacttttcagtgcaactcacttggatgcaaatgaaaataatgcggtcatttattcatttcttcaacaatatgagctaggtactgtggtgctggggagacagaagcaaaaaaaaaatacaaaaatatctgcccttatagagtttacattctagtgaagtagccagaaaagaaacaaaatcaatcagtaaaatacatagtatgttagataacgtgtgctaaggaggaaaaaaataaagcaaggaaaagtactagggagtatgagggaagtatgtagttttacataaggtggtcagagtaggtctcactgagaatatggtatttgagtgagaatctcaggaaggaagggagagaaagctgtacagatatcattagggtgtgtatgtatgtgtattatatatatatgaacatatcatatatacacaaataaatgtattataagaaatgggctcacatgattatgtaggtggacaagtcccaagatctgcagggtgggtcagcaagctggagatccaagagagctgggtttagttctagtctgagttcaaaggcctgagaaccaggagagccaatggtatagtttccattcaaaagctggtgggcttgagactcaggaagagccagtgcctcagattgaaggtattttggcagggggaattctttcttactcaaaggaaggtcactcctttttgttctactcaggccttcaactgattggatgaggcccactcatgtgagggagcacaatctgctttacttagtctaccaatttaagtgttaatcatatcccaaaacaccctcactgacacacccagaataatatttgaccaaatatctggtcaccccatggcccagtcaagttgacacacaaaattaaccatcatagtctaaagtgcctaggacagtgtctgatgttcagcaaataaaatatctgtgtgtataattgaattagaaacaaaaatgacttgtggagttcttcgcttttgctatgatgaacaggcatctccaaggcaaagtgaaatcttagaaaggagtcatcatgtataccaaatgatcaccagagttcagtaaacaagtgtttgctttgaaagttatttcccaagaatctgatattgctgctctaaattttcagagctgtattcagcaaaaacaaaataaaaagagcaacaaaaaagtttgttgtgtagaaataaataataaaataacacataagaaaacaattcctttagaacaagcttgtccaacctgcagcccatgggctccacgtggcctaggacggctttgaatgctacccaacacaaatttgtaaactttcttaaaacgttacaagagttttttttgcaaatttttttaaagctcatcagctatctttagtgttagtgtattttatgtgtggcccaattcttcttcttccagtatggcccagggaagccaaaagattggacactcctgctttaaaacctaatattgaaattttagtgaagccatttgtaatctataaagaagataagcatagtctgaagtaatactttgaaagcaatagagaagaattatctgcaactattctttaacagattagaagttaggtttcagggtacacagacaaagattatcattaagttgtcaaagagtgtgagcttagagtgactgttgaacagttagtgctgtagaataaatgctggaccagagatgagaattgaggcaatcgaaggttgttattattaacgattaaatgccaaagggactcacaagagtgggaaggaaataaggttgttcagaatgctgtctccaacaccagtgcctaatgcagtaccaaatcatgtctgacatggatgtttaagccctgcaagtcatagatgggtagataataagtgtgtcactaatgtacaagcattaatggtcacagagtcatttccctcaagccatgaccatatctgttccaaatgaaaagatactagctaaatgagaagctctctgatgaagagcctgaatttaacttgactagggtgactgctttaagccagaggtgctagacaatctccttacttccacagacacagggactttaaaccaaggatcaccaagtggtcaaaaacaaagatctttcacttcagccctaggacaagcagacttcggtagagaatctggatacatgtaaagttcagtcacttggaaaatgtggacaagctctctcttggctattagcatcagcatcgtggacaatggaagctctataaaataagtggctctttagtgtaataaaggaatattttattcattatgacattttggaatgctttttgtatttatggtctaaatgatacacaaatttcccttgtggggactgggagaactgatactactacgggattgccagcctgaatttagagccccagtccaagctgtaatatgtgggcactccaggttagcggctgccctccccacatctcaggcaggggacttgccaagagaatttacctgtagatgagttataacttcaagggtgccaaactcaaatggaaaggtattcaggactagcaggactggctatttgacgtgtggggcctagtgcaaaatgaaaatatggggccctatttcaagatagcaacagcagagcattaaaccaagcatgggacccttctaagaacaagatgctatgtgactgcataagttgcatactcaggaagccagccttaagaaataggttagctcataggattgatgcagtgcttagcaagggatatcaaggtgtattgtgaataataaactctacttaaatatttcattggcttcaattttgcaggagtgcatatataaagcagaatgcactgtttatagtactatcaggacactatactcagcaattcattcattcattcattcattcattcattcaagaaatacttatagagcccttattttttgtcagttactgttctatgtaccagggatatagcagtgggcaaaatggacaaacatttttgctctcacgaactctacattttgcgtatgtgtttgctgtctaattgaggcttattttaatttcacgcattatagtctcttgcatagccaagcctggctatttgcatcatgaggacagaaccacaaagtcactgcccacttactggcaggatacagtaggtgaaggcagaataaataggcagaaatgactctttgaaatttaaaagttgagaatagtgttacgaatgcactgaaactatgacttgacaggtaagaggaagtatgaggggtagaactctaatgggtaggtccattgcttgctagtcaggattcctaaatccttctcatggcttgtacacactacttgagtgatgttggcccaaatgataagaaaaaaataatagttgcctgtcttctcctagaggaaagttctctgaaaataatcaagacagtatatgttgggttatgagatgctaattagttcataacattctctataattacgctaatcattcaacacaatttaacagcctcctactgtatgttagacactgtgttaaatactgggagagggtaaaaatgaatagccacaatcctccttaagaagcttgcaatataatgagggcagacatttgtcaacagtgccttagacttagaaacagatcactgctatgggaacagagaggagaggtgcctaacgttctttgtggtgggtagagcagggaaacattttccaaagttctaaggaattttgagcaaacaggaaagagagatgacatcggaaaggcaaagaatgtctgaatgtgctgtaagagcaaaggaaggcaattgacaaaatttttaaaggcctatgtttcctcttgcttgcaaagttcctttaaatcagcatactgggtcatattgaacagaagttgtcatatttggcaaatcaagttattatatatggctccctcccccacattccactccgccagtgccaaaagattgataggggagttaatggaacttggtgtcaaacagcaatgaaaagtctaaaagtctaacaacaaagtttttcaaagatctttgagcagggccagtatatgaagggaaatgtacaagatagggcctacgtatggtggagtggttagggtaaaggtttctttttgcaatctttactttcccctacttgttcttagggtcagaccccaaatttttcaggtgaattttactgaaatttcagaacaaataatcccaatcttatatatgttgttctacaaagtagaagaacagaaaaagctgctcatcatgtttatgaaactaatatgctgtagatatcacaaccagccaaagatagtgcaagaaaaaagtgatagaggccaatttaacttacagacatagatataaaaatcttccaagtctgtctatctatctatctacctatctgtaatctcacgatgtactaggtagaccttattttaggagttcaaggatgtttcactgctggaatgtgcaggagtataattacattaatggaacaaaggagaaaaattacatgattttctgaaaagttatagaagaaagcaatagatagatatcaatgatgatttcagatttaaagaactcagtacactagaaatggaagggaactcccctaaccttataaaagtaagccaaaataaaaatatttaatggagaaaatgtagaagcattccctttaaggtcaagagcaaggcagtgatgcttgttatcacagctactatttaacataatactggaagatctagccgaagaaattatataagagaaagaaatgacctctaaagtccaaatcagggattaggaagagaattaaaattgctagacccagcccctagagcctaaatgtggcctgaaacacataactgcttccccttacttaactgcattgggcaaagatggccaattacccgggttgcctaggatggaagagttatcctgtatgtggaacatttcatacgaaacctgagacagtcatcctagttctggctctgatttctttctttccttatgacccctggaaatttactttcctttcaagctaggctataccttaaagttggatggtttaggcattatattttattcagcattcctagatgtttttaagcagaaagtatatattcatatcagctcaatctgctcttttgccagaattctccttatttagcccttaataataatgaaatgtttaatggcatgggaaaatgctcatgtgtagagtgaaaaaagcagattataaaactctctatatagttggattccaattttgttggaaaaatgtatcacatattcatgtccttgaaattttttgatagctacctaaacttctgcaggtataattgacttcagtgtctttgtgggggaaaagttattgtggataggtggggaaaagaaatcttacaggaagagtagctggaaaaaggaaaggatggtggggtaggggaagaaaaatgatgcagattggaagaggtaacacagtgggaatgtttccgttataatgagagggtttgcattttaaatacttatgacccatagctcttttgcacattggagatagaaagttatcgaatgttattccttagagccctagatctagtcgtcattgtcttattgagcatgtaactaggtcattggaggaggcattttaaacaatcgcttactaagggatttttttttttaaatctaggcttcaataccaacaagaatagaataagttaattaaaatatatttgaatattaaatatccctagaaaggccctgatatagctcagattcttttacggcaataaagcaaactggtagttttgagcttaggctcaaaacagaggtttgacaagttgtcagagatttctttgcaatgaaaatgatacaactgttctcggagtttttaggtataggtcacaacaggaaaatcccatctgctgcggcacattccttaaatagctaaaaatagattaagtagagaggaggaggatgggtgtaactgtaaatgtttagcactagggagatccttgtggtgatggaatacagcaggtcctcgtataacattgtttcattcaacaatgtttcctcataacatccatgaggaaaaaaattgattttctgccaggaccactgtctgtgtggagtttacatgttcctcccatatctgcgtgggttttcgctaaatactccagtttcctcctacatccaaaagctgtgcaccttaggctcattggcctgtctacgttgtctgagtgagtgtggaggtgtgcgtgagtgtaccccgtgatggaatgctgtcctggccagggtaggttactgccttgcaccctgagctgcagggataggctctggccctccagaaccctaaactggaataagtaggatggaaaatgaatgaatgaatgagtacaaattatggtaaaataaaaatttgtaaagcctacggtaatcttacacatacatgacaatacatgaaatggtaagaaagtgatcagtgagcctgccatatatgttattgcttgtttctgaactgagtggtgggaggaggtgttcctaacaatgttcactttgcagacatttatttctttatttaatccattatcactatgaccactgtcattcagtgattcaccaaaaattgggtaaataattatcttgttttcattaatctttttaaaatgtagggatagcttgcattcatttcagtgtttaatattagaagtgtttgaggtctatatttaaaagtttggtgatgtttttgtgaccagaaatataccatagaaacttggctcttgtttatatcagttagcctgtggtcaaattggcttcattgtacataatttcactttaaagtcacagtttccaataactatcaacaacattaagtgaggacttactgtatttctgcatttggatttcagtgatggttacaaaaaatctacacatgtgatcaaatggaatagaactatatatacacacattgttccaatgccaatttccaagttttgatagtgcactgtagttatgtaagatgtaactattgggggaaattgggtgaagaatacaccagatccctctttttcatctttgcaacttctaatgaatctgtcgttatttctgttaacctaaataacaaacagagagaaacctctttaaaagaaaagatgtttatttgggaatagagtattgtaatgggaatactcatgtcatatttagggaagtaaaggaagacaaagctttttcaaggaaaaaatggggcgaattgtatatttgttttgaaataattatctttggctacaaagatcaataacaagggtgatacccgtccaaggttggacaggcagttgttgggcagatagtcctgtggaagtatttttatgtattcggttgtgatggccctggtgtaaggttgtgttttttgtagtattctgaaatttattttttgttattggtcatacaagcatgagaaccctctcttcatggcgtttcctgactctatttgttagggtgttcttaacattagtaactgcattttgattttgacaacttttgcattacaaaataaaatttttaaaaatatagaaacaacaataaaataagtcaaatagactagactctcccaggaaaagccaacatgaccctcttatgtcctgcctactctgtcttaattgggcaccaaagctgggagaagacgcttgggctggctgatgcctgtgtctcttgccaaataatgtgatagataagggaaagctaaatatagctttgtttactttcacttatataggccacagtgtcttgctgactttagagaaatgcccttccaaaacattattctacaactggtttatttggacagtccagtcaaatgaccagttgattcactgaagggggaaaaaaaatcacctaacgagttgaatgagcactcagaatatcaactccttcacccagtacagacagtcatgggatgcatgttcatgataaaacagctcccagaacagcttttaggtaatttaacttaggctttttaaaagtagagagtcatacttggaataagcattacaaataattagaactttggaaatgtgctaatttaactgtaaacactaagctgaaatgtcacaagaacatttagaactagaaaagaccagaactgttcctgtgttagtttcctaaggataatggcctccagctccatccatgttcctgcaaaggacatgatcttattcatttttatggtcgcatagtattccatggtgtatattcatcacattttctttaccacattttctaataccacatgttctaccttgtaagtgggagataaataatgagaaccaatgagcacaaagagggggaacaacagacgctggggcctacttgatgggggagtgtaacaggagggagtggagcaggaaaaataactattgggtactatgcttagtacctgggtgatgaaataatctgtataccaaacacccatgacatgacaaacctacacatgtacccctgaaccttaaataaaagttaagcaataaaaaagaccagaactcatctactctaatcactttatagtagcagaagtttatatctgagtgaaaactaaatttcagacatatctgggcatccgtttccgtaggttcattatattgggactggggccttggaggagtttgttttactttctggcccttgagggaagaatcttggtgatcaatgggtgagcagaatgcctattcctttgactggctccatagactaggcctgagtcctatggaaagaagagcattctttccatttctcctcagaacatagcatgtgttaaatgcagtgcggactgaatggaagctgcagattgggagcacaagaaggcagtgtttcaaaaacagtagcaatggcagtgacttttctggaagaaaagagaaaatgtgtctatttatttaataaatatttgtcgaggacttactatattccaggcactgttctgggtgcttgtgatacagcaatgctctcaaggagcttaaattctagtgatgggggtatggagagtaagaagagaagaaacaacaggcataatgaataaataaattatataatgcacttgaatgttgtaagtagtatggaaaaaagtaaaaatgcagaaggagaggggttcagagtggctctgaggagaggtacaggctgtactactgaatagttagaatagacttcattaagcagagaagatttgaaggacataaaggagttaacaaagctgacatctaagggaggtgcattccagcagaggagacagccagagcaaaagccccaaggtgggcatgtgcctgcaagtttgtggaatggcaaagaggcctgtgtgactgattgagagaggacaagggaaagagtattgggtaagtagttagaaagatgattgcaccggatgacatatagggccttgcaggccatggtgagtactgggatttgactctgcaggagatggcagccagttcagggttttgagcagaggaggggcagggcctggcttgtgtttgaatgcaatcactctggttgctgtgctgggaatagactgtaggatggcaagaagataaacagaatgccagtgatgagcctgttgcagcaatgtaggggctcacaccagagtgttagcaggtgagaggtggtgttaagaaggtcagatttggccaggtgtggtggctcacacctgtgatcccagcactttgagaagtcgaagtatgtggattgcctgagctcaggagtttgagaccagcctgggcatcatggtgaaacctcttctctacaaaaaatacaaaaattagccaggcatggtgatgcatgcctatagtcccagctacttgggaggctgaggtgggaggactgcttgagcctgggagattgaggctacagtgagccatgatcatggcactgcactccagcctgggtgacccagtgagaccctgtctcaaaaccaaaaacaaacaaaaaaaagtcaagtagaaggtcagattttggggaatgagttgaaggaagtgtgtataggatgtgtataggatctcctgacagattggatgtgaggtgtatgagaaaggaagtaatccagaaagcatgagaaggatggagttgttatcagtactgatatggggcagagcacaatagaagctggtttgaggaaccaggagttggccgtgttgaattggagatgagtattagacactgaagtgcagatgttgaatagttgctggatataagagtaaggaattcagagctagagatataaatttggggatcgtcagcaaaaagctgatatttaaagctgtgtagtagagcaaatgagatagttacagaagaggacccaaggacccaatcccaaaattgacgtagggaaagagaggaaagccagcaaaggagactgagagtgttgaatgaggtaggagggaaacacaaagtgtagggtgttttcgaagtcaagggaagaaaggggaagggtgtaatacaagctcaaatgctgctgctaagtcaggtgagagataagacttgaaggtaggtttatcaatatagaggtcattgtagaccttgattagggtagttgtgatagaatggtaggagtgaaagcttgattgtagtgattttaagaaagactagaggatgcctgggtgtgacagcttgcagttgtaatcccagtgctttgggaagtgaaggcaggagggtcacttgaggccaggagtttaagaccagcctgggcaacatagtgagaccgcatctctacacaaattaaaaaagaaaaattagccaggtatggtgggatgtgcctgtagtcctagctatttgagaagttgatcatgacactgcactctaacctaggctaaagagtgagattctgtctcaaaaagaaagaaagaaagaaagaaagaaagaaagaaagaaagaaagaaagaaagacagactagaggaattggagacagcagagataggaactcttttgagaatttttgcctcaaacaggaatgaacaaatcaaacaataattggtgggaggagtgaggtcaagggaaatgcgtattttctaaggtaatgtattccataatttaaaaaggagattgtttccacctttgaagtttatcgacaaatgcccaattgatgcagatttgttgaattaagatatgatgtgtcaaatgtaaaaagagggtgtagagcagtgattttcaaagtaagatccccataacagcaagagcagtatcaactgggcgtacttgagaaatgtaaattctaggaggccacatcccaaacctaccaagtcagaaattctgtggttcaacaagcccttcaggtgattctgatgtacattaaattttgagagctcctggcgtagaacactgttatcaggtgagtttacttccaaatcattaacatgaatgaatgaagaatgtttattttttcattaagagcagaaggtatgttttttttttcctgtccttgcccaaccacctattgttcagatgtctccatcctaaggaaaatcccccccgcccccgcactccccaactcagaaataacagcatatttatatgttggtggaaatgatccagtagagagtaaaacattagtgatataggagaaagagtgtaaaaatgttggagtcatgtacttcaataggtgagagaggaaggatcaaatacataggtgacattagataggagcaagtagagcctcacatatggtgataagcaagatggcagagagcataggcacaaaggcggtggcaataggagtctgaagtttcttattgcttcagttttctcagttaagtaggaatcaaagtcattagctgagagtgagaatggaggagttttgacaagcttggcaactcattctgtgggcaatactctatgaaaatagtcactcaaacattgctagtgggagtgtgaaattatagcgactcctttggagagagattttgcagtatttttatcttttgacacagcaatctcacttctggtattttaaccagaagatccccctccacaaacaagaaacaacgtatgtaccgaggttatttactgcagcattgtttgtaacggaaaacaatattggaaataacctatatgatcatttatagaggactggctaatgatgcatcattaggttgtttattctgagtttttcttctttttttgatgtaggtgcttattgctataaattctcctcttagtaaagctatcactatataccataggttttggtatgttgttgtgtttccattttcatttgtttgaagacattttttaatttcctttttaatctcttcattgacccactggccattcaggttcatattgcttaatttccatgtgtttatgtagtttccaaaattcctcttattattgatctctagttttataccattgtagttagagacaatgcttgatattatctcaatatttttaatttttaatacttgttttgtggctactatatggtctatctttgggaatgatccatgtactgagaataatgtgtattctgcagccatatgatgaaatgttctattctgtaaatatctgttaggttcatttgttctatagtggagattaagtctgatgtttctttgttgattttctatctggaaggtctgtccagtgctgacagttgggtgttaaattacacagctatttttgtattggggtctatttctctagctctaataatatttgctttatatatctgtgtgttccagtgttggatgcatatctgtttaaagttattacatcctcttgatgaattcactcctttgtcactatatagtgacctaatttgtctctccttatagttttcctcttgaactctattttgtctaagtacagtgactcctacttttttttggtttccattagcatgaaatatctttttccatccctttatttgcagtctatctgtgtctttataggtgaagtgtgttacatttaggcaaccgatcattgggtcttgctttttaatcccttcagccattctatgtcttttgattggagagtttagtccatttacattcaatgtcattattgttaagtaatgacattctcctgccattttcttactcgttttctggttgttttgtagtcttttttttttttttttctttcctgccttcctctcttccttttagtgaaggtgattttctctgggatatattttaatttcttcctttttaatttcgtgtatctgttgtatgttttaagatttgaggttaccatgaggcttgcaaataatatggcccatattttaaactgataataacacttattacataaattaaaaaaaatcaactagcgataagaagactaataaaatctccacactttaacttcattcctccaatttttactttttgttgtttctatttctatcttaccatactgcctaagtcttgaaaagttgttttagttactagttttgattggaccatcttttggtgtttctactcaaactacgagtaatttatacaccataatttcaatgttatacttgtctgtttttctgtgcactattaccagtgaggttttctttttgtctgtttgtttgtttgttttttgagatggagttttgctcttgttgcccaggctggagtgcaatggtgtgatttcggctcactgcaacctccgcctcccaagttcaagcaattctcctgcctcaccctcccaagtggctgggattataggcatgcgccaccatgcccggctaattttgtatttttagtagtgacggggtttcgccatgtttgccaggatggtttcgaacccctgacctcaggtgatccacccgccttggcctcccaaagtgctgggattacaggcgtgagccatggcgccaggcgcagatgttttcttatagttcattagcatcctgttctttcagattgaagaactccccctagcatttcttgcaggacaggtcttgtgttgaaatccctcagcttttgtttgtctgggaaagtctttatttctccttcatgtttgaaggatattttgtctggaaatgctaatctaggataaaagtttttttttttttcttcagcactttaagtatgtcatgccactctttcctggcctgtaagctttctaccaagaagtctgctcccagacatatcagagctccattgtatgttatttgtttcttttctcttgctgcttttaggattctttctttcttttttttctttttttcttttttttttttttgagatggagtcttgctctgtcacccaggctggagtgcagtggcgtgatctcggcttactgcaagctccgcctcctgggttcacgccattctcctgcctcagcctccccagcagctgggactacgggcgccggccatcacgcccggctagttttttttgtatttttagtagagacagggtgacctcgtgatccgcccgcctcagcctcccaaagtgctgggaatacaggcgtgagccacagcgcctggccaaggattctttctttatccttgacctttgggagtttgattaataaatgtcttgaggtagtcttatttgtgttcaatgtgcttgatgttctatagacttgtttttgtacttgaatattggtatctttctctaggtttgggacattctctgtttctatctctttgaataaactttctactcctatttctctctctaccttctatttaaggtcactatctcttagatttgccctttgaggctagtttgtagatctcgtaggcatgcttcattcttttctttttttttctttcatctcctctgagtgcagattttcaaatagcctgtcttcaagctcactctttctttcttctgctttatcaattctgctgttaggagactttgatgcattcttcagtatgtcacttgccttgttcagctccggaatttctgctttatttatttatttatttatttatttattttttgagacagggtctcactttgtcactcacgctgtactgcagtggtgtgatcttggctcactgcaacttctgcctcctgggttcaagcaattcttgtgcctcagcctcccgagtagctggaattacaggcatgtgccaccgcacccagctaatttttgtatttttagtggagataggattttgccatgttggccagactggccttgaactcctggcctcaaagtgatctgcctgcttcggccttccaaagcactaggattacaggcatgaaccactgcaccaggcctgcttgattcttttttaatttcaatatctttgttaaatgtatctgataggagtctgaattccttctctgtgttatcttgcatttccttgagctacctcaaaacagctattttgaattctgtcttaaaggtcacatatctctgtttctttgggattagtcactggcgccttattcagttggtgaagttatgtttttttggatggtgttgatgcttgtggatgtttatcagtatgtgggcatcaaagagttaggtatttattgtaattttcacagtctgggcttgtttgtatccttcctgggatctttccaggtatttgaaggagcttgagtgttgtgatctaagtctttggttactgtggccatatctgctttgagggttccccaagcccagtaatgctgtggctctttaagactcgtaaagttaccgcctttgtggtcttaggtaagatctgggagaatccaggcagagactcttgtcttcttcccttacattccctgaaacagagtccctctctctctctgtgatgagctgccaggagctggaggaagggtgacacaagtacccctgtgaccaccatgactaagactgtactgagtcagacctggagccagtacagcactgggtcttacacaaggcctgcagtcaccactgcctgactactgcttatgttcactcaaggcccaaggactctacaatcagcagatggtagagccagccaggtttgtgtccttcccttaaggatggtgaattctctctggctctgggtaggtccagtgatgctgtccagtagccagggcctggagttggaaaccttagaattctacctggtgctctgttttattatggctgagctggtacccatgccatgagacaaaatccttctcactctaccctcacctttcctcaagcagaggagactctccccatggccaccactgcttaggcccacagtaagtgctgcctggctaccacagatgttcaactaaagaccaaggattcttctgtcagcttgcagtgaatgctgccagtcttgagtctcttcagcattgtagattctcctttgtcccagggcaggtccaggaatgccatctatggtccaaggcctggaaacagggatcctaagtgcctgtttggtgctctaccccactgtggccaagctggtacccaagctgaaaaacaaagtcccctttactcttccctctcctttcctaaagcagaaggagtctctccccatagccaccatagctgggaatatgttgggtcacacctgaagccagcacaactctgaatctcacccaaggcctacagtgagtgctgactggctaccactgctgattattctgggctcaagggctctttagtcaacaggtgatgatttctgctaggactgagtctttccctttaaggcaacagtttcccttctggcccagggtgtgtttagaaatggcatctgggagctagggcctcaagaatcttcctcggttccctattctactatggctaagctggtatacaacttgcaagataacatcctctttgctttccactcttctctcctcaagcccagggaaggagtctctcccagagctgcaagttgtgctgcctggtgttgagggagagggtgatgcaagcactcccttggccactccagcttgtctcactatgttgtgtgccccctagcccactggctcctagctcggcagagcaccaggacttgcccaggagttgctgtccttgtggcctagactgcctttcaagtttatttaagatcctatagccctttagcatacagtggtggggcttgctggaacttaggttccaaccactgggctggataatttgcctttgtctaaggttggtctaaatgctccctctatgggcaccggctgaattctgccccatgttgctttccactctgacagggcagcactgaattccaatgcatagtcccacaaccactgtgctctccctccatcaagtgcgtggattctctctccatgtgccgtgtgaccactgccggggaagggggaggggttgtgtaggcgattggggactgtctttcctaccctcttcagtgcctctttctttaatatgatgttataataaaaccaggtactgtgatttcttaatttttggttcttgtgaaggtgtatttttgtgtagatagctgttcaattttgtattcctgtgtggggaacaattgtgggaggcttctattcagccatcttgctctacttccccctccaactgaggtttcatataaatttgaatatcagcttattaattttcacaacaaccttgtgactttttgggggagagattttattgactccacaaatgaagttgggaggaaatgatatattaacaaaatcaagattccagcctatgaacatgtatattcatgttcataagcatattcctatatttaaatcggtttttaaaaaatttctcagaaatatcttatggtttttagtgtaaagaccttacacatctttttaaagatttatttctaggtatttgcctatttttggaagatattgtagttttaaaaatttgtacttactctcatgatctagataaatgaaattgatttttatattttgaactcataccaacctccttaaaacagctattaattcaaaacttttgtagatacttttggatttttttcacttctaatccttatacctttccctcctttcttccttgacttattatgctgattaggatctctagtatgacatcaaatagaagtgttgctaacagatatcttatcttgttcctgatctcaggggaaatttttaagataatttaacaataattatgatgtttgctgtaggatttttgtagctgctattttttcagattgaggaagttcccttgtcttctaagtttgctaagaggctttcttttttttttttcaaatcacaactgaaagtagaattttattaaatatcttttctgcatctagtgaggtgatcatatgattttctgtccttttttcctgttaatatagtaaattataagttaaatgaattaattttccataagcttcatgtggttgtgatatattagcattgttaaatatcactaagttagatttacacacacacacacacacacattattaatgtgatttttatttcttggaatgtcctttacaagttttggttttggtggcttcataaaacaagatgagaagtgttccatgttttctctctctttttttttttttggaagtattcgtgtaagattaatgttatttactctccaagtgttggaaacactttgtcagtgaagccatttaagcctggagttttactttgtggtgaggtttttaataacaggtttcagttctttcatagatctaggactatttatttttgtttcaattttattgagttgtgtttcttaaagaatttgtccactttctctaaggctgcttctaccctaactcccttgctcttcttttcttaggtcccccaactacacttatattagtctttcccactattatatatatatatatcttacaaccttttcagcaatatcaatgctttttacttctacacttcattctagatactatctagtgcactaattccattttcaactttgcccaatctgctgttaaatccatctgttgagctcttaattttagctattttatttcctgttccagacttccatttggctttttattgtagattccaattctgtggaacctgttcatcacaattattttaaagtcttggtctgataactccaatattacctgtttctgtttctagcctctctctttttctcttgctcctatttatttgtatgtcagtaatttttactgaatagatcaagaacgtgaaggattagaccctcctcctccctgcctatttctgacccaagagatgaggcctaaactgagattgaagagaagatttgaattcagaatgagattgaagttttgatttaaactctgaaaagctttaatacctgaaaagaagattgttttaaaaaatgaaagtgcttatgtttctcttattgtttcttcagagtttaaaagaatacaactctttgtcatataaaaaatggttttgactgaatgcccaacattgtgtatgaaacatatagagactccagatcatgttatcttccttcagaggatattgccttttcctctgtcaggcagcagagaattagataaatgtaattcaacttggggctttgctaactgaaagctaatttgcggtctttgtatgtcccagtttgcttctggtttactcccacttctagggcgtagctctctaggagttccaactaagaatcagggttgtttgttggaactcctcctacttataaggtcatgaactccaatttttcaccctcgaacattgtgagcctgcttgcttgctctactttgttgatgctttctgattggcttcttaccctaattttctgcacagtttaaactgtaaatgcctctagaagaacactggttccaagcgctaggttctattctctgtcccttctatctctctgagagcttggtctctcaacacctagctgcattgtccactgaacacttttaatctccccagccccaagaggtgacctaaaactgctctgctaaattctttatctcattctccatgccaaaaacatcaaggaggaaaataagtgtccatgaagtaagctcaccttaatgagctcccttctttctggatctagtttctcaagtcctggctaccttagtagccttcttatttcttctcaaaaaatgtttataaaaacctgccttttctactttttcttgttaaaatattcatctctactacaagctactcaatcatagaagacctctgaactcatgattaaaatacgtgcatgcgtgtgtgtgtgtgtgtgtgtgtgtgtgagtgtgtgtgtatgtatttctatctctgttcattgattgactggatataggagtaatgaccctgtagtagcatacatacctaacaccaagatatttgtttctatgcatcatttcttacttaaactaatcaggtttctttggagaaactactgatttcagtgaaagtacaagcacaatgtgagcctagatatagatatcttgctataccagtgatatggtttggctatgtccccacccaaatctcatcttgaattgtagctcccataatccccacatgttgtgagagggacccagtgggaggcaaatgaatcatggagaagggttttttttccctgctgttctcatggtagtgaataagacttacaagatctgatggttgtataaagggcggttctcctgcacatgctctcttgcctgctgccatgtaagacatacctttgctcctcctttgccttccaccatgattgtgaggccacaccagccatgtggcacttgagtccattaaacctcttttttctttataaattacccagtctcgggtatttcttcatatcagtatgaaaatggattaatacaaccagaaagtaagaaagtgatcagagaatgatggggacatttcataaggacacaggaagcaacttgaagggacacccactggccaagtctgggataatttaaacataaaaaaaatttggtaatagtttatagtacattgagttaagaaaaaaaaatccataaattcatggtaatattcaaagtaaaataaaaggagaggagaaaaaagaattcccagtgtgttttttttaaaacagaagaatgccagctactaaatgtagaaggaataaaataattagaaaagcaatactttttaacacccaaagtaataattggctcaggtaaggatcatcagaggatgctaatatgactgggtaaaatgttgaaaataagtctcaaaatatcactctacagactacttttaaagagaaaaaatgtgctttctcaatggaaaagtctggtggtcatcactttaaccaagtggtcaagcttggcaatgccaatagtggttttgcttgatgatgtgccttcagtatgatcaagaggaaggtacacaacgtcatttatgtgatgttcttgctggaaatgtttgatctaactatcatagcgaggaaagaggcaattctagaatgtgaggtatgatggaggacatcctacctggactctttaaagagacactcaaatgctctgagtgaatcttgagtggatcttggattggaaaaacagaagctataaaggatattttggaggataatcgaaggaattttagtgaagactggatgctggatgatattgaattcatggtgactttcttaggtgtgttggtattgtggttataggaatcagtttattcttggaaaatacatcctgaaatattttgcagtgaagtgtcatgatgaaagcaacctacttttgtatgatttggaaaaaaaggatgtgtgggtatgggtgtgtatttagataaatagagtggatgtatccagatgttaacagttggcaaacataggtgagaggtatgcaggtcttgaaaattagaagaaaaaactcttgtagcgttttattttttcaacgaaaatccacaagatggcagtagaggaacaccctcagaatgggtttcttgggggcctcttataaggtgacattttctgatttgaaaagcaggatgagagatccaacaaaggattgttttggctttgtgaatacatttacatgtaatgttatacaaaggtatgaagacaaaatgccgtttggttgtatcattctatgaattgctttcatcgaaataaataccattttgttaaatttggtccataaactcctgaaatgtgtccaaaatgttatgtgtatgagcattctccttttatgatgagaatatctacagtttctactatgtctcaaaggggtcaattattgctccccaaacttagaagcttgaggggttcaagaaagtggcactagatcaatgccttaatcacatcagaactggtagtagtttaagccatttctctttaatatgtgctttgaaagtgagtttagtgaagtgctctggcagtgcttatttgttaaatggattgatgtaggaactagtggatgtggatggataggagtcagaagacctgggtgtgaatgtagcacttatgccatcctcttccccaacatctttccccaaacacacacaccaagttaaaactgtagccagcaagatgtttgtggtcacataaaacaattctcccccaaacaaaatcagttgtttgcctgtatttcatttttttactccccaaacagaaacagcttattggtcagtggagatgcctgcaatataaaattttctctttataaacatttgtgaaaagagttcatatttttagggcaacatgagccaagcttgtaattgcgggaagcttctagtcttctgtgagtgtcagcttgcctcttgttcccaccttcaacccctgccaccccaagagttttggtttggatcaggactaggtttctataaactgcaacgtgagctgctag

SEQ ID NO: 28862 - DNA, 2703 bp, Homo Sapiens
tggtgtggcttctcccctgaaaacttttctagtccatcctgcttctgtgtccaataattcttctatgcctttgcccagaaacacaagttcctgagaagaaaaaaggaatcttcaggagagcctatgacctattttgtgggctagagcagcacggtgcacccaagatgactgaggaagaggagaaagccatgaagatgaagatgacggacacctctgagaagcctttgtggaggacagtgttgaacgtcaatggcatcatcctggtgaccgtggctgtcttttgccatgcatattttgcctgagtcctaccttttgctgtagatttaccatggctggactcttactcaccttcctttagtctcgtcctgtggtgttgaagggaaatcagccagttgtaaattttgcccaggtggataaatgtgtacatgtgtaattataggctagctggaagaaaaccattagtttgctgttaatttatgcatttgaagccagtgtgatacagccatctgtacctactggagccgcagaagggagtccactcagtcacatccagaaaaaggcagactaagaatcagaagccatgtgattgatgtctgacgtgagtctgtctcaggtagattccgggtgtcagtgtggtttataatccttgaatattgttttagaaactttggtctccctggttcctgccacttttcctgtccgtcctcctccccattttttttttaaaagaaagctgttttcccctcatcatatccctcttgagttttgcctggactttccctctcaagtgtgtcaatcaggtaaactgaggaatgcatggaagctgaggatggagcttgatgggctccctgtcctgggtgtttgctctctgaagtggaggcctgaggaaggtagtacttccacaaaagggagggacccgggccccagcctcaagctagtgggggaggcagatagcctgaatccaggggattttctgggcttcttaaaatgtccattgtgagttccccgtgtttgggattccactcattttggcattcacagtgcctggaatgtcttagattttcagcaatgcgtgttgaataaatgaatgacataggcatttatttttaaatctttgcttgctttttacatgagcctggcccttagttaaccttttcttgtggctacacaaagtatgctcactggttactaatgacttgggatgcatttgtcaaactgattatattagttttctagggatgccataacaaagtagcacagaccagatggctcaagcagcagacatttattttctcacagttctagaggctagaagttggaggccaagatgtcagcagggttggtttcttctgaggcctctctccttggttgcagatggtcatatctcactctgtcttccgtggccttccttttgtctgtgtcctaaatctactcttctgataaggacatcagtcatattggaataggacccaccctaatgtcttcattttaatcacctctttaaagcccctacctccaaatacagtcacactgtgagaaactgagggttaggaagtcagcaagtgagtcttgaagagatactaaacaaacccacaacacagataaagtatgcattttggagatttccaagccagagtctcccgtgaaaaaggtaaacggaagcagttattgtgcagcaaaaggaaaaagaattacaaactgaacgtatgtaggtgaggcaaggcagggtagggcagggcctttgggtaggctgatcagagggtttttcaacaataaatcaatgggaatgcatttgttgctcccaggaccctggcaccttgactctggtactatagcatgtcagcaaatacaagcaaagcccaacactctgatttgcatttatgccaatctaaactatccggtgtttagtttgattttttgagtgcaggttcattcaaggaccaggttcccttgtgctcagggtgaagtagaaccagaaaacatcgttatccattcccagaagttttggaagagccttggtagaaaagcagaagctgctttgaccgtgaaaatatttgactcctatcagtttttggtcaggagaagatatccacctagaccaacctgaggagaaggctcagagtacagatataccccgagcaacgtgatcaatgtccttgaaccttcatttttcatctgaaaacagagacataaatgcctggctcacagatttaaatgttatacattgacagcatttatcagtataacatttatttaaataagtaggtgctcaataggtgttggtcttctaacttgtctacatcccatccccattccagggtcttcagaattgaaggagagatgttgtatcactgttagaaggctgctttgggacattctgcagcagggaggagggactgtcaacccctacaccatgaccaccaagttcctcaccttggctgagtccctaaaactctctgaacctcaggttcctccaagcataatgcagacttcacagagctgttgtaaagattaggtgaggtcaattgatactgcttaaaaggcccggtccgtagaagatgcccaataaacattactgctttcccccctcaccctactgcctgaaaaaatattacacctgtgagactgactttgagaaccagtgtgggtggggagttgtgcatataaactatttaatgagtaccaaacacaaaagtcaagctt

SEQ ID NO: 28863 - DNA, 2071 bp, Homo Sapiens
gaggaggaggaagaagagcggagagagaaggaagaggcgatgtgagctgggaagggggcaagtgtccgggacacccacacccctgtattctcctccgaaccccttcatgcccaaatcccggaaactccagcgtgtctccagccgtgttggtaccattttcagatttcatcttcctaaactggaaatgtcaatgagaggaaattaacacccccaagagctgcagtgagcaaatgcattgagcttgggtcaggacaattccatttggggaccagagatggacggtcactcagcctatggagatgaagaaactgaggttcagagaggttaagagactccactgaggtcacacagccgatgacagacaaccttctgtgccttcatcaagctggttgtgtacccaccatgtccctggcgacaggatgggaaagaaaaagccctaattaaggatcgtcagaaaccacagttggaggaggacggcagagacagtttccctccccgctataccaacacccttccttcgaggtcctcgctcctgagggaccctggactgtcacagagattaatgaccccttatcttctttggatgtgaaaggaaatcactggttaaagcttgatcgagagacattatcagctctttaaggattgcaggagaataggctactttattttctgaaaaggtaaatatatgcaagcaaagccaacatgccacgaatggcgttggtctaccacacagccgtgtctgggacacagttgggggtcatcccccagcaggagtgaagtcgagcttagcggcccttgtgtcctcccttggaattcctgccatcccttttgattgagcctccacctctgggatttttcttccatttttctcctctcttaggagggagttcctgctacccatcgtgggaggccaccatcaggactgcgaagatggtgaccctgcggaagaggaccctgaaagtcgtcaccttcctcgtgctcttcatcttcctcacctccttcttcctgaactactcccacaccatggtggccaccacctggttccccaagcagatggtcctggagctctccgagaacctgaagagactgatcaagcacaggccttgcacctgcacccactgcatcgggcagcgcaagctctcggcctggttcgatgagaggttcaaccagaccatgcagccgctgctgactgcccagaacgcgctcttggaggacgacacctaccgatggtggctgaggctccagcgggagaagaagcccaataacttgaatgacaccatcaaggagctgttcagagtggtgcctgggaatgtggaccctatgctggagaagaggtcggtgggctgccggcgctgcgccgttgtgggcaactcgggcaacctgagggagtcttcttatgggcctgagatagacagtcacgactttgtcctcaggatgaacaaggcgcccacggcagggtttgaagctgatgttgggaccaagaccacccaccatctggtgtaccctgagagcttccgggagctgggagataatgtcagcatgatcctggtgcccttcaagaccatcgacttggagtgggtggtgagcgccatcaccacgggcaccatttcccacacctacatcccggttcctgcaaagatcagagtgaaacaggataagatcctgatctaccacccagccttcatcaagtatgtctttgacaactggctgcaagggcacgggcgatacccatctaccggcatcctctcggtcatcttctcaatgcatgtctgcgatgaggtggacttgtacggcttcggggcagacagcaaagggaactggcaccactactgggagaacaacccatccgcgggggcttttcgcaagacgggggtgcacgatgcagactttgagtctaacgtgacggccaccttggcctccatcaataaaatccggatcttcaaggggagatgacgcagtgaagggctgaggatggacgcactgtcacacctctgcatttccagccccagcatcttgctggagccgttccatcccggagcttggaggggcagcctcaggtgtgtgcctgggc

SEQ ID NO: 28864 - DNA, 2139 bp, Homo Sapiens
gtgagacaggggtagtgcgaggccgggcacagccttcctgtgtggttttaccgcccagagagcgtcatggacctggggaaaccaatgaaaagcgtgctggtggtggctctccttgtcattttccaggtatgcctgtgtcaagatgaggtcacggacgattacatcggagacaacaccacagtggactacactttgttcgagtctttgtgctccaagaaggacgtgcggaactttaaagcctggttcctccctatcatgtactccatcatttgtttcgtgggcctactgggcaatgggctggtcgtgttgacctatatctatttcaagaggctcaagaccatgaccgatacctacctgctcaacctggcggtggcagacatcctcttcctcctgacccttcccttctgggcctacagcgcggccaagtcctgggtcttcggtgtccacttttgcaagctcatctttgccatctacaagatgagcttcttcagtggcatgctcctacttctttgcatcagcattgaccgctacgtggccatcgtccaggctgtctcagctcaccgccaccgtgcccgcgtccttctcatcagcaagctgtcctgtgtgggcatctggatactagccacagtgctctccatcccagagctcctgtacagtgacctccagaggagcagcagtgagcaagcgatgcgatgctctctcatcacagagcatgtggaggcctttatcaccatccaggtggcccagatggtgatcggctttctggtccccctgctggccatgagcttctgttaccttgtcatcatccgcaccctgctccaggcacgcaactttgagcgcaacaaggccatcaaggtgatcatcgctgtggtcgtggtcttcatagtcttccagctgccctacaatggggtggtcctggcccagacggtggccaacttcaacatcaccagtagcacctgtgagctcagtaagcaactcaacatcgcctacgacgtcacctacagcctggcctgcgtccgctgctgcgtcaaccctttcttgtacgccttcatcggcgtcaagttccgcaacgatctcttcaagctcttcaaggacctgggctgcctcagccaggagcagctccggcagtggtcttcctgtcggcacatccggcgctcctccatgagtgtggaggccgagaccaccaccaccttctccccataggcgactcttctgcctggactagagggacctctcccagggtccctggggtggggatagggagcagatgcaatgactcaggacatccccccgccaaaagctgctcagggaaaagcagctctcccctcagagtgcaagccctgctccagaagttagcttcaccccaatcccagctacctcaaccaatgccgaaaaagacagggctgataagctaacaccagacagacaacactgggaaacagaggctattgtcccctaaaccaaaaactgaaagtgaaagtccagaaactgttcccacctgctggagtgaaggggccaaggagggtgagtgcaaggggcgtgggagtggcctgaagagtcctctgaatgaaccttctggcctcccacagactcaaatgctcagaccagctcttccgaaaaccaggccttatctccaagaccagagatagtggggagacttcttggcttggtgaggaaaagcggacatcagctggtcaaacaaactctctgaacccctccctccatcgttttcttcactgtcctccaagccagcgggaatggcagctgccacgccgccctaaaagcacactcatcccctcacttgccgcgtcgccctcccaggctctcaacaggggagagtgtggtgtttcctgcaggccaggccagctgcctccgcgtgatcaaagccacactctgggctccagagtggggatgacatgcactcagctcttggctccactgggatgggaggagaggacaagggaaatgtcaggggcggggagggtgacagtggccgcccaaggccacgagcttgttctttgttctttgtcacagggactgaaaacctctcctcatgttctgctttcgattcgttaagagagcaacattttacccacacacagataaagttttcccttgaggaaacaacagctttaaaag

SEQ ID NO: 28865 - DNA, 14136 bp, Homo Sapiens
gcactgcagcgccagcgtccgagcgggcggccgagctcccggagcggcctggccccgagccccgagcgggcgtcgctcagcagcaggtcgcggccgcgcagccccatccagccccgcgcccgccatgccgtccgcgggccccgcctgagctgcggtctccgcgcgcgggcgggcctggggacggcggggccatgcgcgcgctgccctaacgatgccgcccgccgcgcccgcccgcctggcgctggccctgggcctgggcctgtggctcggggcgctggcggggggccccgggcgcggctgcgggccctgcgagcccccctgcctctgcggcccagcgcccggcgccgcctgccgcgtcaactgctcgggccgcgggctgcggacgctcggtcccgcgctgcgcatccccgcggacgccacagcgctagacgtctcccacaacctgctccgggcgctggacgttgggctcctggcgaacctctcggcgctggcagagctggatataagcaacaacaagatttctacgttagaagaaggaatatttgctaatttatttaatttaagtgaaataaacctgagtgggaacccgtttgagtgtgactgtggcctggcgtggctgccgcgatgggcggaggagcagcaggtgcgggtggtgcagcccgaggcagccacgtgtgctgggcctggctccctggctggccagcctctgcttggcatccccttgctggacagtggctgtggtgaggagtatgtcgcctgcctccctgacaacagctcaggcaccgtggcagcagtgtccttttcagctgcccacgaaggcctgcttcagccagaggcctgcagcgccttctgcttctccaccggccagggcctcgcagccctctcggagcagggctggtgcctgtgtggggcggcccagccctccagtgcctcctttgcctgcctgtccctctgctccggccccccgccacctcctgcccccacctgtaggggccccaccctcctccagcacgtcttccctgcctccccaggggccaccctggtggggccccacggacctctggcctctggccagctagcagccttccacatcgctgccccgctccctgtcactgccacacgctgggacttcggagacggctccgccgaggtggatgccgctgggccggctgcctcgcatcgctatgtgctgcctgggcgctatcacgtgacggccgtgctggccctgggggccggctcagccctgctggggacagacgtgcaggtggaagcggcacctgccgccctggagctcgtgtgcccgtcctcggtgcagagtgacgagagccttgacctcagcatccagaaccgcggtggttcaggcctggaggccgcctacagcatcgtggccctgggcgaggagccggcccgagcggtgcacccgctctgcccctcggacacggagatcttccctggcaacgggcactgctaccgcctggtggtggagaaggcggcctggctgcaggcgcaggagcagtgtcaggcctgggccggggccgccctggcaatggtggacagtcccgccgtgcagcgcttcctggtctcccgggtcaccaggagcctagacgtgtggatcggcttctcgactgtgcagggggtggaggtgggcccagcgccgcagggcgaggccttcagcctggagagctgccagaactggctgcccggggagccacacccagccacagccgagcactgcgtccggctcgggcccaccgggtggtgtaacaccgacctgtgctcagcgccgcacagctacgtctgcgagctgcagcccggaggcccagtgcaggatgccgagaacctcctcgtgggagcgcccagtggggacctgcagggacccctgacgcctctggcacagcaggacggcctctcagccccgcacgagcccgtggaggtcatggtattcccgggcctgcgtctgagccgtgaagccttcctcaccacggccgaatttgggacccaggagctccggcggcccgcccagctgcggctgcaggtgtaccggctcctcagcacagcagggaccccggagaacggcagcgagcctgagagcaggtccccggacaacaggacccagctggcccccgcgtgcatgccagggggacgctggtgccctggagccaacatctgcttgccgctggacgcctcttgccacccccaggcctgcgccaatggctgcacgtcagggccagggctacccggggccccctatgcgctatggagagagttcctcttctccgttgccgcggggccccccgcgcagtactcggtcaccctccacggccaggatgtcctcatgctccctggtgacctcgttggcttgcagcacgacgctggccctggcgccctcctgcactgctcgccggctcccggccaccctggtccccaggccccgtacctctccgccaacgcctcgtcatggctgccccacttgccagcccagctggagggcacttgggcctgccctgcctgtgccctgcggctgcttgcagccacggaacagctcaccgtgctgctgggcttgaggcccaaccctggactgcggatgcctgggcgctatgaggtccgggcagaggtgggcaatggcgtgtccaggcacaacctctcctgcagctttgacgtggtctccccagtggctgggctgcgggtcatctaccctgccccccgcgacggccgcctctacgtgcccaccaacggctcagccttggtgctccaggtggactctggtgccaacgccacggccacggctcgctggcctgggggcagtgtcagcgcccgctttgagaatgtctgccctgccctggtggccaccttcgtgcccggctgcccctgggagaccaacgataccctgttctcagtggtagcactgccgtggctcagtgagggggagcacgtggtggacgtggtggtggaaaacagcgccagccgggccaacctcagcctgcgggtgacggcggaggagcccatctgtggcctccgcgccacgcccagccccgaggcccgtgtactgcagggagtcctagtgaggtacagccccgtggtggaggccggctcggacatggtcttccggtggaccatcaacgacaagcagtccctgaccttccagaacgtggtcttcaatgtcatttatcagagcgcggcggtcttcaagctctcactgacggcctccaaccacgtgagcaacgtcaccgtgaactacaacgtaaccgtggagcggatgaacaggatgcagggtctgcaggtctccacagtgccggccgtgctgtcccccaatgccacgctagcactgacggcgggcgtgctggtggactcggccgtggaggtggccttcctgtggaactttggggatggggagcaggccctccaccagttccagcctccgtacaacgagtccttcccggttccagacccctcggtggcccaggtgctggtggagcacaatgtcatgcacacctacgctgccccaggtgagtacctcctgaccgtgctggcatctaatgccttcgagaacctgacgcagcaggtgcctgtgagcgtgcgcgcctccctgccctccgtggctgtgggtgtgagtgacggcgtcctggtggccggccggcccgtcaccttctacccgcacccgctgccctcgcctgggggtgttctttacacgtgggacttcggggacggctcccctgtcctgacccagagccagccggctgccaaccacacctatgcctcgaggggcacctaccacgtgcgcctggaggtcaacaacacggtgagcggtgcggcggcccaggcggatgtgcgcgtctttgaggagctccgcggactcagcgtggacatgagcctggccgtggagcagggcgcccccgtggtggtcagcgccgcggtgcagacgggcgacaacatcacgtggaccttcgacatgggggacggcaccgtgctgtcgggcccggaggcaacagtggagcatgtgtacctgcgggcacagaactgcacagtgaccgtgggtgcggccagccccgccggccacctggcccggagcctgcacgtgctggtcttcgtcctggaggtgctgcgcgttgaacccgccgcctgcatccccacgcagcctgacgcgcggctcacggcctacgtcaccgggaacccggcccactacctcttcgactggaccttcggggatggctcctccaacacgaccgtgcgggggtgcccgacggtgacacacaacttcacgcggagcggcacgttccccctggcgctggtgctgtccagccgcgtgaacagggcgcattacttcaccagcatctgcgtggagccagaggtgggcaacgtcaccctgcagccagagaggcagtttgtgcagctcggggacgaggcctggctggtggcatgtgcctggcccccgttcccctaccgctacacctgggactttggcaccgaggaagccgcccccacccgtgccaggggccctgaggtgacgttcatctaccgagacccaggctcctatcttgtgacagtcaccgcgtccaacaacatctctgctgccaatgactcagccctggtggaggtgcaggagcccgtgctggtcaccagcatcaaggtcaatggctcccttgggctggagctgcagcagccgtacctgttctctgctgtgggccgtgggcgccccgccagctacctgtgggatctgggggacggtgggtggctcgagggtccggaggtcacccacgcttacaacagcacaggtgacttcaccgttagggtggccggctggaatgaggtgagccgcagcgaggcctggctcaatgtgacggtgaagcggcgcgtgcgggggctcgtcgtcaatgcaagccgcacggtggtgcccctgaatgggagcgtgagcttcagcacgtcgctggaggccggcagtgatgtgcgctattcctgggtgctctgtgaccgctgcacgcccatccctgggggtcctaccatctcttacaccttccgctccgtgggcaccttcaatatcatcgtcacggctgagaacgaggtgggctccgcccaggacagcatcttcgtctatgtcctgcagctcatagaggggctgcaggtggtgggcggtggccgctacttccccaccaaccacacggtacagctgcaggccgtggttagggatggcaccaacgtctcctacagctggactgcctggagggacaggggcccggccctggccggcagcggcaaaggcttctcgctcaccgtgctcgaggccggcacctaccatgtgcagctgcgggccaccaacatgctgggcagcgcctgggccgactgcaccatggacttcgtggagcctgtggggtggctgatggtgaccgcctccccgaacccagctgccgtcaacacaagcgtcaccctcagtgccgagctggctggtggcagtggtgtcgtatacacttggtccttggaggaggggctgagctgggagacctccgagccatttaccacccatagcttccccacacccggcctgcacttggtcaccatgacggcagggaacccgctgggctcagccaacgccaccgtggaagtggatgtgcaggtgcctgtgagtggcctcagcatcagggccagcgagcccggaggcagcttcgtggcggccgggtcctctgtgcccttttgggggcagctggccacgggcaccaatgtgagctggtgctgggctgtgcccggcggcagcagcaagcgtggccctcatgtcaccatggtcttcccggatgctggcaccttctccatccggctcaatgcctccaacgcagtcagctgggtctcagccacgtacaacctcacggcggaggagcccatcgtgggcctggtgctgtgggccagcagcaaggtggtggcgcccgggcagctggtccattttcagatcctgctggctgccggctcagctgtcaccttccgcctgcaggtcggcggggccaaccccgaggtgctccccgggccccgtttctcccacagcttcccccgcgtcggagaccacgtggtgagcgtgcggggcaaaaaccacgtgagctgggcccaggcgcaggtgcgcatcgtggtgctggaggccgtgagtgggctgcagatgcccaactgctgcgagcctggcatcgccacgggcactgagaggaacttcacagcccgcgtgcagcgcggctctcgggtcgcctacgcctggtacttctcgctgcagaaggtccagggcgactcgctggtcatcctgtcgggccgcgacgtcacctacacgcccgtggccgcggggctgttggagatccaggtgcgcgccttcaacgccctgggcagtgagaaccgcacgctggtgctggaggttcaggacgccgtccagtatgtggccctgcagagcggcccctgcttcaccaaccgctcggcgcagtttgaggccgccaccagccccagcccccggcgtgtggcctaccactgggactttggggatgggtcgccagggcaggacacagatgagcccagggccgagcactcctacctgaggcctggggactaccgcgtgcaggtgaacgcctccaacctggtgagcttcttcgtggcgcaggccacggtgaccgtccaggtgctggcctgccgggagccggaggtggacgtggtcctgcccctgcaggtgctgatgcggcgatcacagcgcaactacttggaggcccacgttgacctgcgcgactgcgtcacctaccagactgagtaccgctgggaggtgtatcgcaccgccagctgccagcggccggggcgcccagcgcgtgtggccctgcccggcgtggacgtgagccggcctcggctggtgctgccgcggctggcgctgcctgtggggcactactgctttgtgtttgtcgtgtcatttggggacacgccactgacacagagcatccaggccaatgtgacggtggcccccgagcgcctggtgcccatcattgagggtggctcataccgcgtgtggtcagacacacgggacctggtgctggatgggagcgagtcctacgaccccaacctggaggacggcgaccagacgccgctcagtttccactgggcctgtgtggcttcgacacagagggaggctggcgggtgtgcgctgaactttgggccccgcgggagcagcacggtcaccattccacgggagcggctggcggctggcgtggagtacaccttcagcctgaccgtgtggaaggccggccgcaaggaggaggccaccaaccagacggtgctgatccggagtggccgggtgcccattgtgtccttggagtgtgtgtcctgcaaggcacaggccgtgtacgaagtgagccgcagctcctacgtgtacttggagggccgctgcctcaattgcagcagcggctccaagcgagggcggtgggctgcacgtacgttcagcaacaagacgctggtgctggatgagaccaccacatccacgggcagtgcaggcatgcgactggtgctgcggcggggcgtgctgcgggacggcgagggatacaccttcacgctcacggtgctgggccgctctggcgaggaggagggctgcgcctccatccgcctgtcccccaaccgcccgccgctggggggctcttgccgcctcttcccactgggcgctgtgcacgccctcaccaccaaggtgcacttcgaatgcacgggctggcatgacgcggaggatgctggcgccccgctggtgtacgccctgctgctgcggcgctgtcgccagggccactgcgaggagttctgtgtctacaagggcagcctctccagctacggagccgtgctgcccccgggtttcaggccacacttcgaggtgggcctggccgtggtggtgcaggaccagctgggagccgctgtggtcgccctcaacaggtctttggccatcaccctcccagagcccaacggcagcgcaacggggctcacagtctggctgcacgggctcaccgctagtgtgctcccagggctgctgcggcaggccgatccccagcacgtcatcgagtactcgttggccctggtcaccgtgctgaacgagtacgagcgggccctggacgtggcggcagagcccaagcacgagcggcagcaccgagcccagatacgcaagaacatcacggagactctggtgtccctgagggtccacactgtggatgacatccagcagatcgctgctgcgctggcccagtgcatggggcccagcagggagctcgtatgccgctcgtgcctgaagcagacgctgcacaagctggaggccatgatgctcatcctgcaggcagagaccaccgcgggcaccgtgacgcccaccgccatcggagacagcatcctcaacatcacaggagacctcatccacctggccagctcggacgtgcgggcaccacagccctcagagctgggagccgagtcaccatctcggatggtggcgtcccaggcctacaacctgacctctgccctcatgcgcatcctcatgcgctcccgcgtgctcaacgaggagcccctgacgctggcgggcgaggagatcgtggcccagggcaagcgctcggacccgcggagcctgctgtgctatggcggcgccccagggcctggctgccacttctccatccccgaggctttcagcggggccctggccaacctcagtgacgtggtgcagctcatctttctggtggactccaatccctttccctttggctatatcagcaactacaccgtctccaccaaggtggcctcgatggcattccagacacaggccggcgcccagatccccatcgagcggctggcctcagagcgcgccatcaccgtgaaggtgcccaacaactcggactgggctgcccggggccaccgcagctccgccaactccgccaactccgttgtggtccagccccaggcctccgtcggtgctgtggtcaccctggacagcagcaaccctgcggccgggctgcatctgcagctcaactatacgctgctggacggccactacctgtctgaggaacctgagccctacctggcagtctacctacactcggagccccggcccaatgagcacaactgctcggctagcaggaggatccgcccagagtcactccagggtgctgaccaccggccctacaccttcttcatttccccggggagcagagacccagcggggagttaccatctgaacctctccagccacttccgctggtcggcgctgcaggtgtccgtgggcctgtacacgtccctgtgccagtacttcagcgaggaggacatggtgtggcggacagaggggctgctgcccctggaggagacctcgccccgccaggccgtctgcctcacccgccacctcaccgccttcggcgccagcctcttcgtgcccccaagccatgtccgctttgtgtttcctgagccgacagcggatgtaaactacatcgtcatgctgacatgtgctgtgtgcctggtgacctacatggtcatggccgccatcctgcacaagctggaccagttggatgccagccggggccgcgccatccctttctgtgggcagcggggccgcttcaagtacgagatcctcgtcaagacaggctggggccggggctcaggtaccacggcccacgtgggcatcatgctgtatggggtggacagccggagcggccaccggcacctggacggcgacagagccttccaccgcaacagcctggacatcttccggatcgccaccccgcacagcctgggtagcgtgtggaagatccgagtgtggcacgacaacaaagggctcagccctgcctggttcctgcagcacgtcatcgtcagggacctgcagacggcacgcagcgccttcttcctggtcaatgactggctttcggtggagacggaggccaacgggggcctggtggagaaggaggtgctggccgcgagcgacgcagcccttttgcgcttccggcgcctgctggtggctgagctgcagcgtggcttctttgacaagcacatctggctctccatatgggaccggccgcctcgtagccgtttcactcgcatccagagggccacctgctgcgttctcctcatctgcctcttcctgggcgccaacgccgtgtggtacggggctgttggcgactctgcctacagcacggggcatgtgtccaggctgagcccgctgagcgtcgacacagtcgctgttggcctggtgtccagcgtggttgtctatcccgtctacctggccatcctttttctcttccggatgtcccggagcaaggtggctgggagcccgagccccacacctgccgggcagcaggtgctggacatcgacagctgcctggactcgtccgtgctggacagctccttcctcacgttctcaggcctccacgctgaggcctttgttggacagatgaagagtgacttgtttctggatgattctaagagtctggtgtgctggccctccggcgagggaacgctcagttggccggacctgctcagtgacccgtccattgtgggtagcaatctgcggcagctggcacggggccaggcgggccatgggctgggcccagaggaggacggcttctccctggccagcccctactcgcctgccaaatccttctcagcatcagatgaagacctgatccagcaggtccttgccgagggggtcagcagcccagcccctacccaagacacccacatggaaacggacctgctcagcagcctgtccagcactcctggggagaagacagagacgctggcgctgcagaggctgggggagctggggccacccagcccaggcctgaactgggaacagccccaggcagcgaggctgtccaggacaggactggtggagggtctgcggaagcgcctgctgccggcctggtgtgcctccctggcccacgggctcagcctgctcctggtggctgtggctgtggctgtctcagggtgggtgggtgcgagcttccccccgggcgtgagtgttgcgtggctcctgtccagcagcgccagcttcctggcctcattcctcggctgggagccactgaaggtcttgctggaagccctgtacttctcactggtggccaagcggctgcacccggatgaagatgacaccctggtagagagcccggctgtgacgcctgtgagcgcacgtgtgccccgcgtacggccaccccacggctttgcactcttcctggccaaggaagaagcccgcaaggtcaagaggctacatggcatgctgcggagcctcctggtgtacatgctttttctgctggtgaccctgctggccagctatggggatgcctcatgccatgggcacgcctaccgtctgcaaagcgccatcaagcaggagctgcacagccgggccttcctggccatcacgcggtctgaggagctctggccatggatggcccacgtgctgctgccctacgtccacgggaaccagtccagcccagagctggggcccccacggctgcggcaggtgcggctgcaggaagcactctacccagaccctcccggccccagggtccacacgtgctcggccgcaggaggcttcagcaccagcgattacgacgttggctgggagagtcctcacaatggctcggggacgtgggcctattcagcgccggatctgctgggggcatggtcctggggctcctgtgccgtgtatgacagcgggggctacgtgcaggagctgggcctgagcctggaggagagccgcgaccggctgcgcttcctgcagctgcacaactggctggacaacaggagccgcgctgtgttcctggagctcacgcgctacagcccggccgtggggctgcacgccgccgtcacgctgcgcctcgagttcccggcggccggccgcgccctggccgccctcagcgtccgcccctttgcgctgcgccgcctcagcgcgggcctctcgctgcctctgctcacctcggtgtgcctgctgctgttcgccgtgcacttcgccgtggccgaggcccgtacttggcacagggaagggcgctggcgcgtgctgcggctcggagcctgggcgcggtggctgctggtggcgctgacggcggccacggcactggtacgcctcgcccagctgggtgccgctgaccgccagtggacccgtttcgtgcgcggccgcccgcgccgcttcactagcttcgaccaggtggcgcagctgagctccgcagcccgtggcctggcggcctcgctgctcttcctgcttttggtcaaggctgcccagcagctacgcttcgtgcgccagtggtccgtctttggcaagacattatgccgagctctgccagagctcctgggggtcaccttgggcctggtggtgctcggggtagcctacgcccagctggccatcctgctcgtgtcttcctgtgtggactccctctggagcgtggcccaggccctgttggtgctgtgccctgggactgggctctctaccctgtgtcctgccgagtcctggcacctgtcacccctgctgtgtgtggggctctgggcactgcggctgtggggcgccctacggctgggggctgttattctccgctggcgctaccacgccttgcgtggagagctgtaccggccggcctgggagccccaggactacgagatggtggagttgttcctgcgcaggctgcgcctctggatgggcctcagcaaggtcaaggagttccgccacaaagtccgctttgaagggatggagccgctgccctctcgctcctccaggggctccaaggtatccccggatgtgcccccacccagcgctggctccgatgcctcgcacccctccacctcctccagccagctggatgggctgagcgtgagcctgggccggctggggacaaggtgtgagcctgagccctcccgcctccaagccgtgttcgaggccctgctcacccagtttgaccgactcaaccaggccacagaggacgtctaccagctggagcagcagctgcacagcctgcaaggccgcaggagcagccgggcgcccgccggatcttcccgtggcccatccccgggcctgcggccagcactgcccagccgccttgcccgggccagtcggggtgtggacctggccactggccccagcaggacaccccttcgggccaagaacaaggtccaccccagcagcacttagtcctccttcctggcgggggtgggccgtggagtcggagtggacaccgctcagtattactttctgccgctgtcaaggccgagggccaggcagaatggctgcacgtaggttccccagagagcaggcaggggcatctgtctgtctgtgggcttcagcactttaaagaggctgtgtggccaaccaggacccagggtcccctccccagctcccttgggaaggacacagcagtattggacggtttctagcctctgagatgctaatttatttccccgagtcctcaggtacagcgggctgtgcccggccccaccccctgggcagatgtcccccactgctaaggctgctggcttcagggagggttagcctgcaccgccgccaccctgcccctaagttattacctctccagttcctaccgtactccctgcaccgtctcactgtgtgtctcgtgtcagtaatttatatggtgttaaaatgtgtatatttttgtatgtcactattttcactagggctgaggggcctgcgcccagagctggcctcccccaacacctgctgcgcttggtaggtgtggtggcgttatggcagcccggctgctgcttggatgcgagcttggccttgggccggtgctgggggcacagctgtctgccaggcactctcatcaccccagaggccttgtcatcctcccttgccccaggccaggtagcaagagagcagcgcccaggcctgctggcatcaggtctgggcaagtagcaggactaggcatgtcagaggaccccagggtggttagaggaaaagactcctcctgggggctggctcccagggtggaggaaggtgactgtgtgtgtgtgtgtgtgcgcgcgcgacgcgcgagtgtgctgtatggcccaggcagcctcaaggccctcggagctggctgtgcctgcttctgtgtaccacttctgtgggcatggccgcttctagagcctcgacacccccccaacccccgcaccaagcagacaaagtcaataaaagagctgtctgactgc

SEQ ID NO: 28866 - DNA, 1838 bp, Homo Sapiens
ccggcgccagccatggagcccgaagccccccgtcgccgccacacccatcagcgcggctacctgctgacacggaaccctcacctcaacaaggacttggcctttaccctggaagagagacagcaattgaacattcatggattgttgccaccttccttcaacagtcaggagatccaggttcttagagtagtaaaaaatttcgagcatctgaactctgactttgacaggtatcttctcttaatggatctccaagatagaaatgaaaaactcttttatagagtgctgacatctgacattgagaaattcatgcctattgtttatactcccactgtgggtctggcttgccaacaatatagtttggtgtttcggaagccaagaggtctctttattactatccacgatcgagggcatattgcttcagttctcaatgcatggccagaagatgtcatcaaggccattgtggtgactgatggagagcgtattcttggcttgggagaccttggctgtaatggaatgggcatccctgtgggtaaattggctctatatacagcttgcggagggatgaatcctcaagaatgtctgcctgtcattctggatgtgggaaccgaaaatgaggagttacttaaagatccactctacattggactacggcagagaagagtaagaggttctgaatatgatgattttttggacgaattcatggaggcagtttcttccaagtatggcatgaattgccttattcagtttgaagattttgccaatgtgaatgcatttcgtctcctgaacaagtatcgaaaccagtattgcacattcaatgatgatattcaaggaacagcatctgttgcagttgcaggtctccttgcagctcttcgaataaccaagaacaaactgtctgatcaaacaatactattccaaggagctggagaggctgccctagggattgcacacctgattgtgatggccttggaaaaagaaggtttaccaaaggagaaagccatcaaaaagatatggctggttgattcaaaaggattaatagttaagggacgtgcttccttaacacaagagaaagagaagtttgcccatgaacatgaagaaatgaagaacctagaagccattgttcaagaaataaaaccaactgccctcataggagttgctgcaattggtggtgcattctcagaacaaattctcaaagatatggctgccttcaatgaacggcctattatttttgctttgagtaatccaactagcaaagcagaatgttctgcagagcagtgctacaaaataaccaagggacgtgcaatttttgccagtggcagtccttttgatccagtcactctcccagatggacggactctgtttcctggccaaggcaacaattcctacgtgttccctggagttgctcttggggtggtggcctgcggactgagacacatcgatgataaggtcttcctcaccactgctgaggtcatatctcagcaagtgtcagataaacacctgcaagaaggccggctctatcctcctttgaataccattcgagacgtttcgttgaaaattgcagtaaagattgtgcaagatgcatacaaagaaaagatggccactgtttatcctgaaccccaaaacaaagaagaatttgtctcctcccagatgtacagcactaattatgaccagatcctacctgattgttatccgtggcctgcagaagtccagaaaatacagaccaaagtcaaccagtaacgcaacagctaggatttttaactttattagtaaaatcttgaagttttcatgatctttaagggtcagaatcttttatgatgattcatagtatgcttagaataaggtgc

SEQ ID NO: 28867 - DNA, 2690 bp, Homo Sapiens
cttcaaggttttgctgactcagtctggtagtcagagtctgcaggagaagacagttcaaggcagggcctggaggattggatcagtttagggacaggtcaaaggctggcttagagaccttagaggcaggttgcttgggtcgttgaatgctagtctggtcctgagagcccttttctctggcaactgtggactcagagctaaccaattgtagttggcagtgggggtgaagggtgatccagaggcctgagctgcagagggcacaagagagaaaagatgtcttagaaagagctttgagaacatgccttggctgctggcagggaccttggatggggtagtctacacccggaagtgcctgcctgccatcctctagtggctgccttgcaaaatatgctcagtgcagccgcgtgcatgaatgaaaacgccgccgggcgcttctagtcggacaaaatgcagccgagaactccgctcgttctgtgcgttctcctgtcccaggtgctgctgctaacatctgcagaagatttggactgcactcctggatttcagcagaaagtgttccatatcaatcagccagctgaattcattgaggaccagtcaattctaaacttgaccttcagtgactgtaagggaaacgacaagctacgctatgaggtctcgagcccatacttcaaggtgaacagcgatggcggcttagttgctctgagaaacataactgcagtgggcaaaactctgttcgtccatgcacggaccccccatgcggaagatatggcagaactcgtgattgtcggggggaaagacatccagggctccttgcaggatatatttaaatttgcaagaacttctcctgtcccaagacaaaagaggtccattgtggtatctcccattttaattccagagaatcagagacagcctttcccaagagatgttggcaaggtagtcgatagtgacaggccagaaaggtccaagttccggctcactggaaagggagtggatcaagagcctaaaggaattttcagaatcaatgagaacacagggagcgtctccgtgacacggaccttggacagagaagtaatcgctgtttatcaactatttgtggagaccactgatgtcaatggcaaaactctcgaggggccggtgcctctggaagtcattgtgattgatcagaatgacaaccgaccgatctttcgggaaggcccctacatcggccacgtcatggaagggtcacccacaggcaccacagtgatgcggatgacagcctttgatgcagatgacccagccaccgataatgccctcctgcggtataatatccgtcaacagacgcctgacaagccatctcccaacatgttctacatcgatcctgagaaaggagacattgtcactgttgtgtcacctgcgctgctggaccgagagactctggaaaatcccaagtatgaactgatcatcgaggctcaagatatggctggactggatgttggattaacaggcacggccacagccacgatcatgatcgatgacaaaaatgatcactcaccaaaattcaccaagaaagagtttcaagccacagtcgaggaaggagctgtgggagttattgtcaatttgacagttgaagataaggatgaccccaccacaggtgcatggagggctgcctacaccatcatcaacggaaaccccgggcagagctttgaaatccacaccaaccctcaaaccaacgaagggatgctttctgttgtcaaaccattggactatgaaatttctgccttccacaccctgctgatcaaagtggaaaatgaagacccactcgtacccgacgtctcctacggccccagctccacagccaccgtccacatcactgtcctggatgtcaacgagggcccagtcttctacccagaccccatgatggtgaccaggcaggaggacctctctgtgggcagcgtgctgctgacagtgaatgccacggaccccgactccctgcagcatcaaaccatcaggtattctgtttacaaggacccagcaggttggctgaatattaaccccatcaatgggactgttgacaccacagctgtgctggaccgtgagtccccatttgtcgacaacagcgtgtacactgctctcttcctggcaattgacagtggcaaccctcccgctacgggcactgggactttgctgataaccctggaggacgtgaatgacaatgccccgttcatttaccccacagtagctgaagtctgtgatgatgccaaaaacctcagtgtagtcattttgggagcatcagataaggatcttcacccgaatacagatcctttcaaatttgaaatccacaaacaagctgttcctgataaagtctggaagatctccaagatcaacaatacacacgccctggtaagccttcttcaaaatctgaacaaagcaaactacaacctgcccatcatggtgacagattcagggaaaccacccatgacgaatatcacagatctcagggtacaagtgtgctcctgcaggaattccaaagtggactgcaacgcggcgggggccctgcgcttcagcctgccctcagtcctgctcctcagcctcttcagcttagcttgtctgtgagaactcctgacgtctgaagcttgactcccaagtttccatagcaacaggaaaaaaaaaaaatctatccaaatctgaagattgcggtttacagctatcgaacttcg

SEQ ID NO: 28868 - DNA, 7943 bp, Homo Sapiens
acggggcctgaagcggcggtaccggtgctggcggcggcagctgaggccttggccgaagccgcgcgaacctcagggcaagatgcttggaaccggacctgccgccgccaccaccgctgccaccacatctagcaatgtgagcgtcctgcagcagtttgccagtggcctaaagagccggaatgaggaaaccagggccaaagccgccaaggagctccagcactatgtcaccatggaactccgagagatgagtcaagaggagtctactcgcttctatgaccaactgaaccatcacatttttgaattggtttccagctcagatgccaatgagaggaaaggtggcatcttggccatagctagcctcataggagtggaaggtgggaatgccacccgaattggcagatttgccaactatcttcggaacctcctcccctccaatgacccagttgtcatggaaatggcatccaaggccattggccgtcttgccatggcaggggacacttttaccgctgagtacgtggaatttgaggtgaagcgagccctggaatggctgggtgctgaccgcaatgagggccggagacatgcagctgtcctggttctccgtgagctggccatcagcgtccctaccttcttcttccagcaagtgcaacccttctttgacaacatttttgtggccgtgtgggaccccaaacaggccatccgtgagggagctgtagccgcccttcgtgcctgtctgattctcacaacccagcgtgagccgaaggagatgcagaagcctcagtggtacaggcacacatttgaagaagcagagaagggatttgatgagaccttggccaaagagaagggcatgaatcgggatgatcggatccatggagccttgttgatccttaacgagctggtccgaatcagcagcatggagggagagcgtctgagagaagaaatggaagaaatcacacagcagcagctggtacacgacaagtactgcaaagatctcatgggcttcggaacaaaacctcgtcacattacccccttcaccagtttccaggctgtacagccccagcagtcaaatgccttggtggggctgctggggtacagctctcaccaaggcctcatgggatttgggacctcccccagtccagctaagtccaccctggtggagagccggtgttgcagagacttgatggaggagaaatttgatcaggtgtgccagtgggtgctgaaatgcaggaatagcaagaactcgctgatccaaatgacaatccttaatttgttgccccgcttggctgcattccgaccttctgccttcacagatacccagtatctccaagataccatgaaccatgtcctaagctgtgtcaagaaggagaaggaacgtacagcggccttccaagccctggggctactttctgtggctgtgaggtctgagtttaaggtctatttgcctcgcgtgctggacatcatccgagcggccctgcccccaaaggacttcgcccataagaggcagaaggcaatgcaggtggacgccacagtcttcacttgcatcagcatgctggctcgagcaatggggccaggcatccagcaggatatcaaggagctgctggagcccatgctggcagtgggactaagccctgccctcactgcagtgctctacgacctgagccgtcagattccacagctaaagaaggacattcaagatgggctactgaaaatgctgtccctggtccttatgcacaaaccccttcgccacccaggcatgcccaagggcctggcccatcagctggcctctcctggcctcacgaccctccctgaggccagcgatgtgggcagcatcactcttgccctccgaacgcttggcagctttgaatttgaaggccactctctgacccaatttgttcgccactgtgcggatcatttcctgaacagtgagcacaaggagatccgcatggaggctgcccgcacctgctcccgcctgctcacaccctccatccacctcatcagtggccatgctcatgtggttagccagaccgcagtgcaagtggtggcagatgtgcttagcaaactgctcgtagttgggataacagatcctgaccctgacattcgctactgtgtcttggcgtccctggacgagcgctttgatgcacacctggcccaggcggagaacttgcaggccttgtttgtggctctgaatgaccaggtgtttgagatccgggagctggccatctgcactgtgggccgactcagtagcatgaaccctgcctttgtcatgcctttcctgcgcaagatgctcatccagattttgacagagttggagcacagtgggattggaagaatcaaagagcagagtgcccgcatgctggggcacctggtctccaatgccccccgactcatccgcccctacatggagcctattctgaaggcattaattttgaaactgaaagatccagaccctgatccaaacccaggtgtgatcaataatgtcctggcaacaataggagaattggcacaggttagtggcctggaaatgaggaaatgggttgatgaactttttattatcatcatggacatgctccaggattcctctttgttggccaaaaggcaggtggctctgtggaccctgggacagttggtggccagcactggctatgtagtagagccctacaggaagtaccctactttgcttgaggtgctactgaattttctgaagactgagcagaaccagggtacacgcagagaggccatccgtgtgttagggcttttaggggctttggatccttacaagcacaaagtgaacattggcatgatagaccagtcccgggatgcctctgctgtcagcctgtcagaatccaagtcaagtcaggattcctctgactatagcactagtgaaatgctggtcaacatgggaaacttgcctctggatgagttctacccagctgtgtccatggtggccctgatgcggatcttccgagaccagtcactctctcatcatcacaccatggttgtccaggccatcaccttcatcttcaagtccctgggactcaaatgtgtgcagttcctgccccaggtcatgcccacgttccttaatgtcattcgagtctgtgatggggccatccgggaatttttgttccagcagctgggaatgttggtgtcctttgtgaagagccacatcagaccttatatggatgaaatagtcaccctcatgagagaattctgggtcatgaacacctcaattcagagcacgatcattcttctcattgagcaaattgtggtagctcttgggggtgaatttaagctctacctgccccagctgatcccacacatgctgcgtgtcttcatgcatgacaacagcccaggccgcattgtctctatcaagttactggctgcaatccagctgtttggcgccaacctggatgactacctgcatttactgctgcctcctattgttaagttgtttgatgcccctgaagctccactgccatctcgaaaggcagcgctagagactgtggaccgcctgacggagtccctggatttcactgactatgcctcccggatcattcaccctattgttcgaacactggaccagagcccagaactgcgctccacagccatggacacgctgtcttcacttgtttttcagctggggaagaagtaccaaattttcattccaatggtgaataaagttctggtgcgacaccgaatcaatcatcagcgctatgatgtgctcatctgcagaattgtcaagggatacacacttgctgatgaagaggaggatcctttgatttaccagcatcggatgcttaggagtggccaaggggatgcattggctagtggaccagtggaaacaggacccatgaagaaactgcacgtcagcaccatcaacctccaaaaggcctggggcgctgccaggagggtctccaaagatgactggctggaatggctgagacggctgagcctggagctgctgaaggactcatcatcgccctccctgcgctcctgctgggccctggcacaggcctacaacccgatggccagggatctcttcaatgctgcatttgtgtcctgctggtctgaactgaatgaagatcaacaggatgagctcatcagaagcatcgagttggccctcacctcacaagacatcgctgaagtcacacagaccctcttaaacttggctgaattcatggaacacagtgacaagggccccctgccactgagagatgacaatggcattgttctgctgggtgagagagctgccaagtgccgagcatatgccaaagcactacactacaaagaactggagttccagaaaggccccacccctgccattctagaatctctcatcagcattaataataagctacagcagccggaggcagcggccggagtgttagaatatgccatgaaacactttggagagctggagatccaggctacctggtatgagaaactgcacgagtgggaggatgcccttgtggcctatgacaagaaaatggacaccaacaaggacgacccagagctgatgctgggccgcatgcgctgcctcgaggccttgggggaatggggtcaactccaccagcagtgctgtgaaaagtggaccctggttaatgatgagacccaagccaagatggcccggatggctgctgcagctgcatggggtttaggtcagtgggacagcatggaagaatacacctgtatgatccctcgggacacccatgatggggcattttatagagctgtgctggcactgcatcaggacctcttctccttggcacaacagtgcattgacaaggccagggacctgctggatgctgaattaactgcaatggcaggagagagttacagtcgggcatatggggccatggtttcttgccacatgctgtccgagctggaggaggttatccagtacaaacttgtccccgagcgacgagagatcatccgccagatctggtgggagagactgcagggctgccagcgtatcgtagaggactggcagaaaatccttatggtgcggtcccttgtggtcagccctcatgaagacatgagaacctggctcaagtatgcaagcctgtgcggcaagagtggcaggctggctcttgctcataaaactttagtgttgctcctgggagttgatccgtctcggcaacttgaccatcctctgccaacagttcaccctcaggtgacctatgcctacatgaaaaacatgtggaagagtgcccgcaagatcgatgccttccagcacatgcagcattttgtccagaccatgcagcaacaggcccagcatgccatcgctactgaggaccagcagcataagcaggaactgcacaagctcatggcccgatgcttcctgaaacttggagagtggcagctgaatctacagggcatcaatgagagcacaatccccaaagtgctgcagtactacagcgccgccacagagcacgaccgcagctggtacaaggcctggcatgcgtgggcagtgatgaacttcgaagctgtgctacactacaaacatcagaaccaagcccgcgatgagaagaagaaactgcgtcatgccagcggggccaacatcaccaacgccaccactgccgccaccacggccgccactgccaccaccactgccagcaccgagggcagcaacagtgagagcgaggccgagagcaccgagaacagccccaccccatcgccgctgcagaagaaggtcactgaggatctgtccaaaaccctcctgatgtacacggtgcctgccgtccagggcttcttccgttccatctccttgtcacgaggcaacaacctccaggatacactcagagttctcaccttatggtttgattatggtcactggccagatgtcaatgaggccttagtggagggggtgaaagccatccagattgatacctggctacaggttatacctcagctcattgcaagaattgatacgcccagacccttggtgggacgtctcattcaccagcttctcacagacattggtcggtaccacccccaggccctcatctacccactgacagtggcttctaagtctaccacgacagcccggcacaatgcagccaacaagattctgaagaacatgtgtgagcacagcaacaccctggtccagcaggccatgatggtgagcgaggagctgatccgagtggccatcctctggcatgagatgtggcatgaaggcctggaagaggcatctcgtttgtactttggggaaaggaacgtgaaaggcatgtttgaggtgctggagcccttgcatgctatgatggaacggggcccccagactctgaaggaaacatcctttaatcaggcctatggtcgagatttaatggaggcccaagagtggtgcaggaagtacatgaaatcagggaatgtcaaggacctcacccaagcctgggacctctattatcatgtgttccgacgaatctcaaagcagctgcctcagctcacatccttagagctgcaatatgtttccccaaaacttctgatgtgccgggaccttgaattggctgtgccaggaacatatgaccccaaccagccaatcattcgcattcagtccatagcaccgtctttgcaagtcatcacatccaagcagaggccccggaaattgacacttatgggcagcaacggacatgagtttgttttccttctaaaaggccatgaagatctgcgccaggatgagcgtgtgatgcagctcttcggcctggttaacacccttctggccaatgacccaacatctcttcggaaaaacctcagcatccagagatacgctgtcatccctttatcgaccaactcgggcctcattggctgggttccccactgtgacacactgcacgccctcatccgggactacagggagaagaagaagatccttctcaacatcgagcatcgcatcatgttgcggatggctccggactatgaccacttgactctgatgcagaaggtggaggtgtttgagcatgccgtcaataatacagctggggacgacctggccaagctgctgtggctgaaaagccccagctccgaggtgtggtttgaccgaagaaccaattatacccgttctttagcggtcatgtcaatggttgggtatattttaggcctgggagatagacacccatccaacctgatgctggaccgtctgagtgggaagatcctgcacattgactttggggactgctttgaggttgctatgacccgagagaagtttccagagaagattccatttagactaacaagaatgttgaccaatgctatggaggttacaggcctggatggcaactacagaatcacatgccacacagtgatggaggtgctgcgagagcacaaggacagtgtcatggccgtgctggaagcctttgtctatgaccccttgctgaactggaggctgatggacacaaataccaaaggcaacaagcgatcccgaacgaggacggattcctactctgctggccagtcagtcgaaattttggacggtgtggaacttggagagccagcccataagaaaacggggaccacagtgccagaatctattcattctttcattggagacggtttggtgaaaccagaggccctaaataagaaagctatccagattattaacagggttcgagataagctcactggtcgggacttctctcatgatgacactttggatgttccaacgcaagttgagctgctcatcaaacaagcgacatcccatgaaaacctctgccagtgctatattggctggtgccctttctggtaactggaggcccagatgtgcccatcacgttttttctgaggcttttgtactttagtaaatgcttccactaaactgaaaccatggtgagaaagtttgactttgttaaatattttgaaatgtaaatgaaaagaagtactgtatattaaaagttggtttgaaccaactttctagctgctgttgaagaatatattgtcagaaacacaaggcttgatttggt

SEQ ID NO: 28869 - DNA, 2481 bp, Homo Sapiens
ggcacgagcagaatccaggggcccggggctgtagattccttgacaaggatatcctagcggcgaaacaacaccgtactgggagtcagaacgtctgggttctagtcttgactgccattaactagcggtatgacattggagaagcttttttgacccttctggatttccgtttccttttctgtaaaatgaggagcttggaagatccggaaaatgaggcccataggaaacaagtgacttgctgagtccagataacactgactgtcagagagaaacatgaaccagaagctactgaagttggagaacttgctacgatttcacactatttataggcaactgcacagtctgtgtcaaagaagagcattaagacagtggaggcatgggttttcatctgcttaccctgtgtggacagctcaactgtgtgcctggccctggccaacagatgtgctcaatggggctgctttatctcagtataggcttctagtaacaaaaaaggaagaaggaccatggaaatctcagttatcttcaacaaaatctaaaaaggtggtagaagtatggattggaatgactattgaggaactggccagggcaatggaaaaaaacacagattatgtatatgaagctttattgaacactgatattgacatagattcactggaagcagactcacatttagatgaagtctggatcaaagaagtgataacgaaggcagggatgaagttaaagtggagtaaattaaaacaggacaaagtcagaaaaaataaagatgctgtaagaaggccccaggcagatccagctttattaaccccaaggtccccagttgttactataatgggccatgttgatcacgggaaaacgacattacttgacaaatttcgaaaaactcaagtggcagcagtggaaactggaggcatcactcagcacattggtgcctttcttgtctctctgccttctggggaaaagataacttttcttgatactccaggacatgctgctttctcagcaatgagagccagaggtgctcaggtcactgacattgtcgtattggttgtagctgcagatgatggagtgatgaaacaaactgtagaatctattcagcatgccaaagatgcacaggttcctattatccttgccgtaaataaatgtgacaaagctgaggctgatcctgagaaagtgaaaaaagagctgctggcttacgatgtggtatgtgaagattatggaggtgatgttcaagcagtgcctgtctccgcacttacgggcgataatctgatggctttggcagaagcaacagttgctcttgcagaaatgttagaattgaaagcagatcccaatggtccagtggaaggaacagtaatagagtctttcacagacaaaggaagaggtcttgttactacagctataattcaaagaggaactttaagaaaaggctctgttctggttgctggaaaatgttgggcaaaagtacgcttaatgtttgatgaaaatggaaaaacaattgatgaggcctatcccagcatgccagtgggaattacaggctggagagaccttccttctgcaggagaagaaattcttgaagtagaatctgagccaagggcacgtgaagttgttgactggaggaaatatgaacaagaacaggagaaaggtcaggaggatctgaaaataatagaagaaaagcgaaaggaacacaaagaagcacatcagaaagcccgtgagaagtatggccatctactgtggaagaagagatcaattctacggtttttagaaagaaaagaacaaatacccttaaagccaaaagagaaaagggaaagagattcaaatgtactttctgtgattattaaaggtgatgttgatggttctgttgaggccattttgaacattatagatacctatgatgcttcacacgagtgtgaactagaattagtacattttggagtgggtgatataagtgcaaatgatgttaaccttgctgaaacatttgatggtgttatatatggctttaatgtgaatgcaggcaatgttatccaacagtcagctgcaaaaaaaggagtaaaaattaaacttcacaaaataatttaccgtcttgttgaagatttgcaagaggaactgagcagcagattaccctgtgctgtggaagagcacccagtaggtgaggcatctatactagctaccttctctgtaacagaagggaagaaaaaagttcctgtggctggctgcagagtccaaaagggacagttagaaaaacaaaaaaaatttaaactaacccgtaatggacatgtaatttggaagggctcattaacctcattgaaacaccataaagatgacatttcaattgtcaaaacgggaatggattgtggtctcagtttagatgaagacaatatggaatttcaagtgggagacagaattgtttgttatgaagaaaagcaaattcaagccaagacttcttgggatccaggattttaaaattacattaaaaatgtaaataactca

SEQ ID NO: 28870 - DNA, 5996 bp, Homo Sapiens
tcacttgagtccaggagttcaagaccagcctgagcacatagtgagaccctgtctctacaaaaaataaagaattagccaggtgtggtgtgcacctatagtcccagctactcgggaggctgaggtaggaggattgcttgattctgggaggttgtagtgagctgtcatcgcaccagtgcactccagcctgggtaatagagtgagaccctgtctcaaatacacacacacacacacacacacacacattttgttggctacttgttgtactttttctatgttttctgtgtctttgctcaacacaagaaaagtatattatgtgtgcatgtgcgtgtgagatatggtaaaatatgaacatgtatttctggggatgtaatgttttccttgaatttctgtcattctctgttttgcttattgtacttctctttccctttcccttctcaccacacacacacacacacacacacacacacacacacagcctgtcagtctcataggtgtcctataaaggtaaatggcaggcaggcatttgaaattacagcagggatagaaagcaaaactcaggctttggaggaggaacctcttgtgctggatgctttgtttttaccttcagtgccttttggattgtttctccctctgttctagaaatgctctcccagcccaggatttcttatgatgcccagtttgaggtcataaaaggacagaccatcgaagtccgttgcgaatcgatcagtggaactttgcctatttcttaccaacttttaaaaacaagtaaagttttggagaatagtaccaagaactcaaatgatcctgcggtattcaaagacaaccccactgaagacgtcgaataccagtgtgttgcagataattgccattcccacgccaaaatgttaagtgaggttctgagggtgaaggtgataggtaagttgctgtgctgtgagaagaaatcatgtgggcttggggcattctttcacccccagggactgtggggacaataagagaagtagggggccaggtgcggtggctcatgcctgtaatcccagcactttaggaggccaaggccggtgaatcattgaggccaggagttcaagaccagcctggccaacatggtgaaaccccatctctactaaaaatacaaaaattagctgggcatgatggcgtgcgcctataatcccagccactcgggaggctgaggcaggagaattgcttgaacccaggaagcacaggttgcactgagccaagttgcgccattgcactccagcctgagcaacaagagcgaaactccatctaaaaaaaaaaaagcgagagaagtagtgggtgcttatgcaaagtccatatactagatatgcaccaaagcagggccaaggttcagtaaaggaggctggaaaatatttgggggctattgatgaggacaatataatctctttccagaacctttcaacaaactgctaaaagatgataagcatgaaagtgtcctgactgcaggaagcactgaagttgtgcatatgggcttcccttagcactttctccttttcagatacactgttctgagaattgtagatcaggactctgctgttgtgactcctagccggggaaccctgccttgtgtgaattcgagattagcctggccaacatggtgaaatcctgtctctaataaaaatacaaaaaattagctgggtgtggtggtgggcacctttaatgccagctactcgggaggctgaggcacaagaatcatttgaacctgggaggcagaggctgcagtgagccaatatcattccgctacactccagcctgggcaacggagcaagactccatctcaaaaaaaaaaaaaattaacattacatagactaagcacctaatggtgtgaggcatacaaaaaagaagacatattctttgtttcaatgctgtggtaagaaacacaagctctcctaatgaaaatgatggacaaacatctgaatcatactaccaataagcatagaaaaaatgttgggggtcatgtttggttgtcacgtgaactatatccttacagtgatggtgatagtaatttagggtatgccagacttcatctagcttaagtgggtaaacattgtgaaaaagctgggctaggtgccagggcttgagaatgggtggccagagaaggctgaagatggctgaacatctccagcaaacacatgagccaaaaggtcccatggggcacttcaaaagactgtgcgcagccaggtgcggtggctcacgcctataatcccagcactttgggagaccgaatggggtggatcacttgagcccagaggtttgtgactagcttggccaacatggcaaaaccccgtctctactaaaaatacaaaaattagcccagcgtggtggtgggtgtcctgtagccccagctactcaggtggctgaggtggtagaatcacttgaatccaggaggcagaggttgcagtgagccaagatcgtgccactgcactccagcctgggtgacagagtgagactctatctccacaaaaaaaaaaaaaaaaaaaaaaattaaaggactgtggccaaatcagatggctggaaacaaaggctggagtttgggaatggagaatcaccggatatgagctgaaaaagtggctgagcctaagcgtgacaggtgtcaggtgccagtctcaggagtaggcaattgtcctgcatgcagtgaaaagccagaagatggaaggaaggacaggatgcaaatgagttctcggaacgatccacctggtggctgggtcagggagcaggcatggtgacttcagacctcatggtacgttagaggctaatgtgaagcccatgtgaagctgttggtttaaactgggtcgatatcagtggcacacatttactgaccatgtgtccagccctgtgtgaagtactgtagtaaattgctccaatggaaactcacaataaccacagaaggccagtaacagcattgtcgttattttatcatgacgcaactgaggcttagggcagacagctggtgggtggtgggactgggatttgagcccactggtgtcccaggcccggagcttggcttcttccattgtcttaccacagcctgcactcacaggagagtgactcataagttacaataccatctgctgaccatctgctctcacactagaaggaaagtctacttggggagacaatttaggatccgaattttggtagttgaggatggagctaggaaaagcggatacaggaggtagccaagttctgcttggacctgcagggagtgaggctggccgggctccaggtggaaatccccaggtgaaaagggagacttggagttcaggaaagtaacctggactggagccataggtttaggtgtcagtggctcagagacagaagctcagcgtgtaggtgaaatcacccaggaggagaatggggatggaaaactgaggattgaattttgcaaaatgttcatacttccggggaaaacaaagaataaccagtgaataagaaaggggtgccaggtaagaagggaagagaatcagagtcatgaggaaccccagaaccccagaaaaagctgagttccacgtaagacctgggcaacagtgaagtatggagagcccaagattgggagcgtggaggaagagcatccaccactgaatttaatcagccccggactcagggacgttggttggggaatcaagtgaccttcccagtttcttcaaaacttgagagagagtgcagtgtcacaagattgtgactacaaaagagtgcagtcagatttcaggggtaacaagaaagtgtgaaataagggagtcaaagcataaaggaaaaaggagaaaaaatggccgatagctagagaaggcgtgggtcaagattgtctgtggcctggcatggtggcttatgcctgtaatcccagcattttggaaggccgaggtgggcaaatcacctgaggtcaggaattcaagaccagcctggccaacagggcaaaaccccgtctctaaaacaacaacaacaacaaaaaaatccaaaaagttagctgggcctggtgggcgcacctgtcattccagctactcgggaggctgaggcaggagatttgcttgaacccaggaggcacacgttgcggtaagctgagattataccactgcactccagcctgggtgataagagcgggactctgtctcagaggaaaaaaaaaaaagttgagcagtggctgtctcatgttcctcttcctctgcccttctttgctcagtgtgaatccttttcctgcttttcagccccggtggatgaggtccagatttctatcctgtcaagtaaggtggtggagtctggagaggacattgtgctgcaatgtgctgtgaatgaaggatctggtcccatcacctataagttttacagagaaaaagagggcaaacccttctatcaaatgacctcaaatgccacccaggcattttggaccaagcagaaggctaacaaggaacaggagggagagtattactgcacagccttcaacagagccaaccacgcctccagtgtccccagaagcaaaatactgacagtcagaggtgagtcagggtctccatagcaagctgtgctgtgggcccccaagggcaagaccagaaaacaccccccttgtaagagggagtttggggggagtctagcttatgtgactgaaggctaggagagtaatgtcctccaggctcttggttgcaagtgacagaaacccactcaaattaagtaaaaaagagaaatcgattattataaggaattgggagaatgtcacatcgttccaattacaaattgttggcagactcaccattgagtcatcttgggtcaaacatccaaccacagaccacctgtagccaaggggattgggtcacgcagaacagacatgattggggaaccacttatgtgggtgtgggggcggtttcctggagaagaagagggctgaaaacacatgccaaaaaggagtctactccacttgagccctggagttggagaccagcctgggcaacatggtgaaaccctgtctctacaaaaagtacaaaaataggctgggcgcagtggctcatacctgtaatcccagctactcgggaggctgagacatgagaatcacttgaacccaggaggtagaggttgcagtgagcagagcttgctccactgcactccagcctgggcaacagagcaagactctgcctcaaaaatcaaaccaacaaaaaatagctgtgtgtggtggtgtgctcctgtagtcccagctactcgggaggctgaggtggaaggattgctcaagcccaggaagttgaggctgcagtgagctgtcatcagcctctagcctgggtgacagagtgagaccctgttcaaaaagaaagaaaaagaaaagagtctacccagcaaagctggtttgttccctccttgaggaccacagctgacctctatttgtagcagaaacaatcatttctgcaccagctctgagtgcagaacccctcagaggtagatggatgctaaggcaagctgccagttacaagagctgtgagaatcagactgacttttgttgcttaaggcctgatattatttcttcctggcagaggaagagcctatatacaaaaaaaattttttgttttgttttgttttcagtcattcttgccccatggaagaaaggacttattgcagtggttatcatcggagtgatcattgctctcttgatcattgcggccaaatgttattttctgaggaaagccaagggtgagcatagttctttccttccatactgactggtcgtccttgccaggaaaccagccagggatgcgtggtgcttttctgacccctggattcagctaggcaaaaatgaaagctattattttcctcattgggcaaaccagaaaagataaaatttgggggaaattacatctttgtgtggttagaagaagccatttctgtagatttgtccacacctagtcctgtaatgcgtgtagagtggggtgcaagcgtcttggagacacacaaacatgcgcataacacccacatgttgcacacacacattg

SEQ ID NO: 28871 - DNA, 3524 bp, Homo Sapiens
tctccgtcagccgcattgcccgctcggcgtccggcccccgacccgtgctcgtccgcccgcccgcccgcccgcccgcgccatgaacgccaaggtcgtggtcgtgctggtcctcgtgctgaccgcgctctgcctcagcgacgggaagcccgtcagcctgagctacagatgcccatgccgattcttcgaaagccatgttgccagagccaacgtcaagcatctcaaaattctcaacactccaaactgtgcccttcagattgtagcccggctgaagaacaacaacagacaagtgtgcattgacccgaagctaaagtggattcaggagtacctggagaaagctttaaacaagaggttcaagatgtgagagggtcagacgcctgaggaacccttacagtaggagcccagctctgaaaccagtgttagggaagggcctgccacagcctcccctgccagggcagggccccaggcattgccaagggctttgttttgcacactttgccatattttcaccatttgattatgtagcaaaatacatgacatttatttttcatttagtttgattattcagtgtcactggcgacacgtagcagcttagactaaggccattattgtacttgccttattagagtgtctttccacggagccactcctctgactcagggctcctgggttttgtattctctgagctgtgcaggtggggagactgggctgagggagcctggccccatggtcagccctagggtggagagccaccaagagggacgcctgggggtgccaggaccagtcaacctgggcaaagcctagtgaaggcttctctctgtgggatgggatggtggagggccacatgggaggctcacccccttctccatccacatgggagccgggtctgcctcttctgggagggcagcagggctaccctgagctgaggcagcagtgtgaggccagggcagagtgagacccagccctcatcccgagcacctccacatcctccacgttctgctcatcattctctgtctcatccatcatcatgtgtgtccacgactgtctccatggccccgcaaaaggactctcaggaccaaagctttcatgtaaactgtgcaccaagcaggaaatgaaaatgtcttgtgttacctgaaaacactgtgcacatctgtgtcttgtgtggaatattgtccattgtccaatcctatgtttttgttcaaagccagcgtcctcctctgtgaccaatgtcttgatgcatgcactgttccccctgtgcagccgctgagcgaggagatgctccttgggccctttgagtgcagtcctgatcagagccgtggtcctttggggtgaactaccttggttcccccactgatcacaaaaacatggtgggtccatgggcagagcccaagggaattcggtgtgcaccagggttgaccccagaggattgctgccccatcagtgctccctcacatgtcagtaccttcaaactagggccaagcccagcactgcttgaggaaaacaagcattcacaacttgtttttggtttttaaaacccagtccacaaaataaccaatcctggacatgaagattctttcccaattcacatctaacctcatcttcttcaccatttggcaatgccatcatctcctgccttcctcctgggccctctctgctctgcgtgtcacctgtgcttcgggcccttcccacaggacatttctctaagagaacaatgtgctatgtgaagagtaagtcaacctgcctgacatttggagtgttcccctcccactgagggcagtcgatagagctgtattaagccacttaaaatgttcacttttgacaaaggcaagcacttgtgggtttttgttttgtttttcattcagtcttacgaatacttttgccctttgattaaagactccagttaaaaaaaattttaatgaagaaagtggaaaacaaggaagtcaaagcaaggaaactatgtaacatgtaggaagtaggaagtaaattatagtgatgtaatcttgaattgtaactgttcgtgaatttaataatctgtagggtaattagtaacatgtgttaagtattttcataagtatttcaaattggagcttcatggcagaaggcaaacccatcaacaaaaattgtcccttaaacaaaaattaaaatcctcaatccagctatgttatattgaaaaaatagagcctgagggatctttactagttataaagatacagaactctttcaaaaccttttgaaattaacctctcactataccagtataattgagttttcagtggggcagtcattatccaggtaatccaagatattttaaaatctgtcacgtagaacttggatgtacctgcccccaatccatgaaccaagaccattgaattcttggttgaggaaacaaacatgaccctaaatcttgactacagtcaggaaaggaatcatttctatttctcctccatgggagaaaatagataagagtagaaactgcagggaaaattatttgcataacaattcctctactaacaatcagctccttcctggagactgcccagctaaagcaatatgcatttaaatacagtcttccatttgcaagggaaaagtctcttgtaatccgaatctctttttgctttcgaactgctagtcaagtgcgtccacgagctgtttactagggatccctcatctgtccctccgggacctggtgctgcctctacctgacactcccttgggctccctgtaacctcttcagaggccctcgctgccagctctgtatcaggacccagaggaaggggccagaggctcgttgactggctgtgtgttgggattgagtctgtgccacgtgtatgtgctgtggtgtgtccccctctgtccaggcactgagataccagcgaggaggctccagagggcactctgcttgttattagagattacctcctgagaaaaaagcttccgcttggagcagaggggctgaatagcagaaggttgcacctcccccaaccttagatgttctaagtctttccattggatctcattggacccttccatggtgtgatcgtctgactggtgttatcaccgtgggctccctgactgggagttgatcgcctttcccaggtgctacacccttttccagctggatgagaatttgagtgctctgatccctctacagagcttccctgactcattctgaaggagccccattcctgggaaatattccctagaaacttccaaatcccctaagcagaccactgataaaaccatgtagaaaatttgttattttgcaacctcgctggactctcagtctctgagcagtgaatgattcagtgttaaatgtgatgaatactgtattttgtattgtttcaagtgcatctcccagataatgtgaaaatggtccaggagaaggccaattcctatacgcagcgtgctttaaaaaataaataagaaacaactctttgagaaacaacaatttctactttgaagtcataccaatgaaaaaatgtatatgcacttataattttcctaataaagttctgtactcaaatgta

SEQ ID NO: 28872 - DNA, 1596 bp, Homo Sapiens
gaattccgggagatagccatggaggacagccccactatggttagagtggacagccccactatggttaggggtgaaaaccaggtttcgccatgtcaagggagaaggtgcttccccaaagctcttggctatgtcaccggtgacatgaaaaaacttgccaaccagcttaaagacaaacccgtggtgctccagttcattgactggattctccggggcatatcccaagtggtgttcgtcaacaaccccgtcagtggaatcctgattctggtaggacttcttgttcagaacccctggtgggctctcactggctggctgggaacagtggtctccactctgatggccctcttgctcagccaggacaggtcattaatagcatctgggctctatggctacaatgccaccctggtgggagtactcatggctgtcttttcggacaagggagactatttctggtggctgttactccctgtatgtgctatgtccatgacttgcccaattttctcaagtgcattgaattccatgctcagcaaatgggacctccccgtcttcaccctccctttcaacatggcgttgtcaatgtacctttcagccacaggacattacaatccgttctttccagccaaactggtcatacctataactacagctccaaatatctcctggtctgacctcagtgccctggagttgttgaaatctataccagtgggagtgggagttggtcagatctatggctgtgataatccatggacagggggcattttcctgggagccatcctactctcctccccactcatgtgcctgcatgctgccataggatcattgctgggcatagcagcgggactcagtctttcagccccatttgaggacatctactttggactctggggtttcaacagctctctggcctgcattgcaatgggaggaatgttcatggcgctcacctggcaaacccacctcctggctcttggctgtgccctgttcacggcctatcttggagtcggcatggcaaactttatggctgaggttggattgccagcttgtacctggcccttctgtttggccacgctattgttcctcatcatgaccacaaaaaattccaacatctacaagatgcccctcagtaaagttacttatcctgaagaaaaccgcatcttctacctgcaagccaagaaaagaatggtggaaagccctttgtgagaacaagccccatttgcagccatggtcacgagtcatttctgcctgactgctccagctaacttccagggtctcagcaaactgctgtttttcacgagtatcaactttcatactgacgcgtctgtaatctgttcttatgctcattttgtattttcctttcaactccaggaatatccttgagcatatgagagtcacatccaggtgatgtgctctggtatggaatttgaaaccaatggggccttggcactaagactggaatgtatataaagtcaaagtgctccaacagaaggaggaagtgaaaacaaactattagtatttattgatattcttggtgtttagctggctcgatgatgttaacagtattaaaaattaaaccccataaaccaactaagccttatggaattc

SEQ ID NO: 28873 - DNA, 2316 bp, Homo Sapiens
cgcactggaaggatctgttgagcgcttcaggaaaggcggacaggcgacactaacaggtgaagatctcgggagaccatgactaagaaaagaattgctgtgattgggggaggagtgagcgggctctcttccatcaagtgctgcgtagaagaaggcttggaacctgtctgctttgaaaggactgatgacatcggagggctctggaggttccaggaaaatcctgaagaaggaagggccagtatttacaaatcagtgatcatcaatacttctaaagagatgatgtgcttcagtgactatccaatcccagatcattatcccaacttcatgcataatgcccaggtcctggagtatttcaggatgtatgccaaagaatttgaccttctaaagtatattcgatttaagaccactgtgtgcagtgtgaagaagcagcctgattttgccacttcaggccaatgggaagtggtcactgaatctgaagggaaaaaggagatgaatgtctttgatggagtcatggtttgcactggccatcacaccaatgctcatctacctctggaaagcttccctggaattgagaagttcaaagggcagtacttccacagtcgagactataagaacccagagggattcactggaaagagagtcattataattggcattgggaattctggaggggatctggctgtagagattagccaaacagccaagcaggttttcctcagcaccaggagaggggcttggatcctgaatcgtgtaggggactacggatatcctgctgatgtgttgttctcttctcgacttacacattttatatggaagatctgtggccaatcattagcaaacaaatatttggaaaaaaagataaaccaaaggtttgaccatgaaatgtttggcctgaagcctaaacacagagctctgagtcagcatccaaccttaaatgatgacctgccaaatcgtatcatttctggcttggtgaaagtgaaaggaaatgtgaaggaattcacggagacagctgccatatttgaggatggctccagggaggatgacattgatgctgttatctttgccacaggctatagctttgactttccatttctggaagattccgtcaaagtggtcaaaaacaagatatccctgtataaaaaggtcttccctcctaacctggaaaggccaactcttgcaatcataggcttgattcagcccttaggagccattatgcccatttcagagctccaaggacgctgggccactcaggtatttaaaggtctaaagacattgccctcacagagtgaaatgatggcagaaatatctaaagctcaagaggaaattgacaaaaggtatgtggagagccaacgccataccattcagggagactacatagataccatggaagagcttgctgatttggtgggggtcaggcccaatctgctgtctctggccttcactgaccccaagctggcattacacttattactgggaccctgcactccaatccactatcgtgtacagggccctggaaagtgggatggggctcgaaaagctatcctcaccacagatgatcgcatcaggaagcctctgatgacaagagtagttgaaaggagtagttctatgacttcaacaatgacaataggcaagtttatgctagctcttgccttctttgctataattatagcttacttctagttgtcctattgtcactgccctgtttttcattgggaagcttatctacagatgccttcagaatctgacgagattgactctcagtttcatattgcccagaaatctactttaatgtctctttcgaaagcattaattcactttcctttttcctacaatgaaacctgttttccatttgtattaactcatctcccttccactcatgatccgtcactcttccttgtggtaatccctagactgggagctcaggtactcttttagtcatctttgtatgtctttagcagagttcttgacatgtggtaggtgcttaataaatgtttgttgtttatcaaattttatggtagggagagtaagtcagcatcggtataaaatcgcttactccacgtaactcttcttctgataggtttgattttctattagaagctcaattttagttttttttttcatattataactaaatatgtttcctgagagataagagaaataatgttcctacaatagttgtatgtatctaagataagacatatagatgcttaagacattttgtttcacttgctattcactagtgtacttgaaacatggtcatttttagcccttttccttaggaaccatgtctttattttctcaataaagaaattactttca

SEQ ID NO: 28874 - DNA, 607 bp, Homo Sapiens
tgaattcgtgggtggcggcggcggcggacccttggggtctggacgcgacggcggcgggacgatgaacgcccctccagccttcgagtcgttcttgctcttcgagggcgagaagaagatcaccattaacaaggacaccaaggtacccaatgcctgtttattcaccatcaacaaagaagaccacacactgggaaacatcattaaatcacaactcctaaaagacccgcaagtgctatttgctggctacaaagtcccccaccccttggagcacaagatcatcatccgagtgcagaccacgccggactacagcccccaggaagcctttaccaacgccatcaccgacctcatcagtgagctgtccctgctggaggagcgctttcgggtggccataaaagacaagcaggaaggaattgagtaggggccagagggggctctgctcggcctgtgagccccgttcctacctgtgcctgaccctccgctccaggtaccacaccgaggagagcggccggtcccagccatggcccgccttgtggccacccctcaccctgacaccgacgtgtcctgtacatagattaggttttatattcctaataaagtatagcggaagaga

SEQ ID NO: 28875 - DNA, 1953 bp, Homo Sapiens
ctcgaggcgcggagctgggagtggcttcgccatggctgtgagaagggactccgtgtggaagtactgctggggtgttttgatggttttatgcagaactgcgatttccaaatcgatagttttagagcctatctattggaattcctcgaactccaaatttctacctggacaaggactggtactatacccacagataggagacaaattggatattatttgccccaaagtggactctaaaactgttggccagtatgaatattataaagtttatatggttgataaagaccaagcagacagatgcactattaagaaggaaaatacccctctcctcaactgtgccaaaccagaccaagatatcaaattcaccatcaagtttcaagaattcagccctaacctctggggtctagaatttcagaagaacaaagattattacattatatctacatcaaatgggtctttggagggcctggataaccaggagggaggggtgtgccagacaagagccatgaagatcctcatgaaagttggacaagatgcaagttctgctggatcaaccaggaataaagatccaacaagacgtccagaactagaagctggtacaaatggaagaagttcgacaacaagtccctttgtaaaaccaaatccaggttctagcacagacggcaacagcgccggacattcggggaacaacatcctcggttccgaagtggccttatttgcagggattgcttcaggatgcatcatcttcatcgtcatcatcatcacgctggtggtcctcttgctgaagtaccggaggagacacaggaagcactcgccgcagcacacgaccacgctgtcgctcagcacactggccacacccaagcgcagcggcaacaacaacggctcagagcccagtgacattatcatcccgctaaggactgcggacagcgtcttctgccctcactacgagaaggtcagcggggactacgggcacccggtgtacatcgtccaggagatgcccccgcagagcccggcgaacatttactacaaggtctgagagggaccctggtggtacctgtgctttcccagaggacacctaatgtcccgatgcctcccttgagggtttgagagcccgcgtgctggagaattgactgaagcacagcaccgggggagagggacactcctcctcggaagagcccgtcgcgctggacagcttacctagtcttgtagcattcggccttggtgaacacacacgctccctggaagctggaagactgtgcagaagacgcccattcggactgctgtgccgcgtcccacgtctcctcctcgaagccatgtgctgcggtcactcaggcctctgcagaagccaagggaagacagtggtttgtggacgagagggctgtgagcatcctggcaggtgccccaggatgccacgcctggaagggccggcttctgcctggggtgcatttcccccgcagtgcataccggacttgtcacacggacctcgggctagttaaggtgtgcaaagatctctagagtttagtccttactgtctcactcgttctgttacccagggctctgcagcacctcacctgagacctccactccacatctgcatcactcatggaacactcatgtctggagtcccctcctccagccgctggcaacaacagcttcagtccatgggtaatccgttcatagaaattgtgtttgctaacaaggtgccctttagccagatgctaggctgtctgcgaagaaggctaggagttcatagaagggagtggggctggggaaagggctggctgcaattgcagctcactgctgctgcctctgaaacagaaagttggaaaggaaaaaagaaaaaagcaattaggtagcacagcactttggttttgctgagatcgaagaggccagtaggagacacgacagcacacacagtggattccagtgcatggggaggcggtcgacgagctcgag

SEQ ID NO: 28876 - DNA, 3127 bp, Homo Sapiens
gtagtgagccggctgagaggcatggagacgcaggaacttcggggggccctggctcttctcctcctttgctttttcacatctgccagtcaggatctgcaggtaattgacctgctgactgtgggcgagtctcggcagatggtagctgtggcagagaagatccggacagccttgctcactgctggggacatctacctcttatccaccttccgcctgccccccaagcagggtggtgtcctctttggcctctattctcgccaagacaacactcgatggctggaggcctctgttgtaggcaagatcaacaaagtactggtgcgataccagcgggaggatggcaaagtccacgccgtgaacctacagcaagcgggcctggctgatgggcgcacacacacagttctcctgcgactccgaggtccctccagacccagccctgccctacatctctacgtggactgcaaactgggtgaccaacatgcaggccttccagcactggcccccattcctccagcggaggtcgatgggctggagattaggactggacagaaggcgtatttgaggatgcagggctttgtggaatctatgaaaattattctgggtgggtccatggcccgggtaggagccctgagtgagtgtccattccaaggggacgagtccatccacagtgcagtgaccaatgcactgcactccattctaggggagcagaccaaggcgctggtcacccaactcaccctcttcaaccagatcctggtggagctgcgggatgatatacgagaccaggtaaaggaaatgtccctgatccgaaacaccattatggagtgtcaggtgtgcggcttccatgagcagcgttcccactgcagccccaatccctgcttccgaggtgtggactgcatggaagtgtacgagtacccaggctaccgctgtgggccctgcccccctggcctgcagggcaacggcacccactgcagtgacatcaatgagtgtgctcacgctgacccctgtttcccgggctccagctgcatcaacaccatgcccggcttccactgtgaggcctgtcctcgagggtacaagggcacacaggtgtctggtgtgggcattgactatgcccgggccagcaaacaggtctgcaatgacatcgatgaatgcaacgatggcaacaatggtggctgtgacccaaactccatctgcaccaacactgtgggctctttcaagtgtggtccctgccgcctgggtttcctgggcaaccagagccagggctgcctcccagcccggacctgccacagcccagcccacagcccctgccacatccatgctcactgtctctttgaacgcaatggtgcagtgtcctgccagtgtaacgtgggctgggctgggaatgggaacgtgtgtgggactgacacagacatcgatggctacccagaccaagcactgccctgcatggacaacaacaaacactgcaaacaggacaactgccttttgacacccaactctgggcaggaagatgctgataatgatggtgtgggggaccagtgtgatgatgatgctgatggggatgggatcaagaatgttgaggacaactgccggctgttccccaacaaagaccagcagaactcagatacagattcatttggtgatgcctgtgacaattgccccaacgttcccaacaatgaccagaaggacacagatggcaatggggaaggagatgcctgtgacaacgacgtggatggggatggcatccccaatggattggacaattgccctaaagtccccaacccactacagacagacagggatgaggacggggtgggagatgcttgcgacagctgccctgaaatgagcaatcctacccagacagatgcagacagcgacctggtgggggatgtctgtgatactaatgaagacagcgatggggatgggcatcaggacaccaaggacaactgcccacagctgccaaatagctcccagctggactctgataacgatggacttggagatgagtgtgatggggatgatgacaatgatggcatcccagattatgtgcctcctggtcccgataactgccgcctggtacccaatcccaatcagaaggactcagatggcaatggcgttggtgatgtgtgtgaggatgactttgacaatgatgctgtggtcgaccccctggatgtgtgtcctgaaagtgcagaggtaacgcttacggattttcgggcctatcagaccgtcgtcctggatcctgagggtgatgctcagattgacccaaactgggttgtgctcaaccagggcatggaaatcgttcagaccatgaacagtgaccctggcttggcagttggatacacggccttcaatggtgtggactttgaaggcaccttccatgtgaacacagtgactgatgatgactacgcaggctttctcttcagttatcaagacagtggccgcttctacgtagtcatgtggaagcagaccgagcagacctactggcaggctacacccttccgggcggttgcccagcccgggctgcagctcaaggcagtgacatcagtgtctggcccaggtgagcacctccgaaatgccctgtggcatactggccacacccctgatcaggtacgactcctgtggacagacccacgaaatgtgggctggcgggacaagacctcctatcgctggcagcttctgcaccggcctcaagttggctacattcgggtgaagctctatgagggaccccagcttgtggcggattctggggtgatcattgacacatccatgcgaggggggcgtcttggtgtattctgcttctcccaagaaaacataatttggtccaatctccagtatcgatgcaatgacacagtgcctgaggactttgagccattccggaggcagctgctccagggaagggtgtgaggaggaggccaccagattcagaattcagaattttagaccctttggccttggggtccatcctggagaccctgaggtctaagctacagcccctcagccaaccacagacccttctctggctcccaaaaggagttcagtcccagaggggtggtcaccccacccttcaggggatgagaagttttcaaggggtattactcaggcactaaccccaggttagatgacagcacattgccataaa

SEQ ID NO: 28877 - DNA, 1325 bp, Homo Sapiens
agcatctacaaaggaggaatagtcaaagcagcagcggcggcggcggcggcggcagcagcagcagcagcaggagaccttctctgatggatgacctctgtgaagcaaatggcacttttgccatcagcttatttaaaatattgggggaagaggacaactcaagaaacgtattcttctctcccatgagcatctcctctgccctggccatggtcttcatgggggcaaagggaagcactgcagcccagatgtcccaggcactttgtttatacaaagacggagatattcaccgaggtttccagtcacttctcagtgaagttaacagaactggcactcagtacttgcttagaactgccaacagactctttggagaaaagacgtgtgatttccttccagactttaaagaatactgtcagaagttctatcaggcagagctggaggagttgtcctttgctgaagacactgaagagtgcaggaagcatataaatgactgggtggcagagaagactgaaggtaagatttcagaggtactggatgctgggacagtcgatcccctgacaaagctagtccttgtgaatgccatttatttcaagggaaagtggaatgagcaatttgacagaaagtacacaaggggaatgctctttaaaaccaacgaggaaaaaaagacagtgcagatgatgtttaaggaagctaagtttaaaatggggtatgcggatgaggtacacacccaggtcctggagctgccctatgtggaagaggagctgagcatggtcattctgcttcccgatgacaacacggacctcgccgtggtggaaaaagcacttacatatgagaaattcaaagcctggacaaattcagaaaagttgacaaaaagtaaggttcaagttttccttcccagattaaagctggaggagagttatgacttggagcctttccttcgaagattaggaatgatcgatgcttttgacgaagccaaggcagacttttctggaatgtcaactgagaagaatgtgcctctgtccaaggttgcccacaagtgcttcgtggaggtcaatgaggaaggcacagaggctgccgcagccactgctgtggtcaggaattcccggtgcagcagaatggagccaagattctgtgcagaccacccttttcttttcttcatcaggcgccacaaaaccaactgcatcttgttctgtggcaggttctcttctccgtaaagaggagcaattgctgtacataccctcctttccttctacctatcttgccttaattaacattccctgtgacctagttggtgcagtggcttgaatgccaaaataaagcgtgtgcactgg

SEQ ID NO: 28878 - DNA, 844 bp, Homo Sapiens
ggcacgaggcgtgacgtccgacaagaaatgctggatgatgtacaaaagaaattgatgagcttagcaaacagctcagaaggaaaagtagacaaagtcctaatgagaaacctcttcattggtcatttccacacaccgaaaaatcagcgtcatgaagtgttacggttaatggggagcatcctgggcgtcagaagggaggagatggagcagttgtttcatgacgatcagggcagtgttaccaggtggatgactgggtggcttggaggaggatcaaaaagtgttcccaacacacctttgagaccaaatcagcaatctgtggttaatagttctttttcagaactttttgttaaatttctagaaacagaatctcatccatccattccaccaccaaagctttctgttcatgatatgaaacctctggattcaccaggaagaagaaaaagagatacaaatgcaccagaaagttttaaagatacagcagaatccaggtctggtagaagaacagatgtaaatccgtttttggctcctcgctcggcagctgtacctcttattaacccagctggacttggacctggtgggccgggcatcttcttctgaaacccatctcagatgttttgcccacatttacacctttgccagcgttacctgacaacagtgctggggttgtgctgaaagccttttaaagcaatagatgattctcaagccagagacaatctagcactttaaagaaaccatgaacactatatgtatgtactttatcacaaagtggcctttggggagaaagtcatgtatttgttcgcaattatgctttctctgaatttaataaaaatattcctaatgcttttag

SEQ ID NO: 28879 - DNA, 1940 bp, Homo Sapiens
aaagccagctacaggcgggcgactgcggggggcccctgaggcggcgggggccatggctggggtcgcgtgcttgggaaaagctgccgacgcagatgaatggtgcgacacgggcctgggctccctgggtccggacgcagcggcccccggaggacctgggttgggcgcggagttgggcccggggctgtcgtgggctcccctcgtcttcggctacgtcactgaggatggggacacggcactgcacttggctgtgattcatcagcatgaacccttcctggattttcttctaggcttctcggccggcactgagtacatggacctgcagaatgacctaggccagacagccctgcacctggcagccatcctgggggagacatccacggtggagaagctgtacgcagcaggcgccgggctgtgtgtggcggagcgtaggggccacacggcgctgcacctggcctgccgtgtgggggcacacgcctgtgcccgtgccctgcttcagccccgcccccggcgccccagggaagcccccgacacctacctcgctcagggccctgaccgtactcccgacaccaaccatacccctgtcgccttgtaccccgattccgacttggagaaggaagaagaggagagtgaggaggactggaagctgcagctggaggctgaaaactacgagggccacaccccactccacgtggccgttatccacaaagatgtggagatggtccggctgctccgagatgctggagctgaccttgacaaaccggagcccacgtgcggccggagcccccttcatttggcagtggaggcccaggcagccgatgtgctggagcttctcctgagggcaggcgcgaaccctgctgcccgcatgtacggtggccgcaccccactcggcagtgccatgctccggcccaaccccatcctcgcccgcctcctccgtgcacacggagcccctgagcccgagggcgaggatgagaaatccggcccctgcagcagcagtagcgacagcgacggcggagacgagggcgtgagtcaggaggagagacagggcagcccagctggggggtcaggatagaccggcagcaagaagcccaagaagataattaggcaccgaccttgggctgctgttagagaactcaggcggcacgccagtgacacggggcactagtcaggagagacctggacaggggtggtgggaagagcttgggcagaagtggctgaaaaactaaggcagtggcaaaggtagaactcaggcaggggtggagaaaagcgttggtcgcagtgattggtgaacacagcgggggtgggtggtagcgctgggggtgattttaggcagcaagaattggagaactcacactgcgaaaagaaaaccttgggtggcagtgatttgaacaccggcagtgctggggcaggacccgagccagcggtggggagagatatagtcagagaacccagcaatacagatccgtccttgggcaaggcgcggtgctggatgatgggtgcggaggaatttgggtaaaggcagagggaaggggtggaggagggccagctcagttgccgaaactctggagtggcggctggctagaaattggtctgtagaaatgaccttgaaaatggagttctggccaggtgcggtggctcacgcctgtaatcccagcactttgggaggccgaggcaggcagatcacgaggtcaggagttcgagaccagcctggccaacatggcaagaccctgtctctactaaaaatacaaaaattagctgggcgtggtggcgcatgcctataatcccagctacttgggaggctgaggtaggagaattgcttgaacctgggaggtggaggttgcagtgaacctagatcacgccactgcattccagcctgggcaacagagcgcatgatcagtcaaccgctcgagggatcttccataggatggtcaagacgcggacgt

SEQ ID NO: 28880 - DNA, 1021 bp, Homo Sapiens
ggcactgctcactcccgcgcagtgaggttggcacagccaccgctctgtggctcgcttggttcccttagtcccgagcgctcgcccactgcagattcctttcccgtgcagacatggcctctggcaccaccactaccgccgtgaagattggaataattggtggaacaggcctggatgatccagaaattttagaaggaagaactgaaaaatatgtggatactccatttggcaagccatctgatgccttaattttggggaagataaaaaatgttgattgcgtcctccttgcaaggcatggaaggcagcacaccatcatgccttcaaaggtcaactaccaggcgaacatctgggctttgaaggaagagggctgtacacatgtcatagtgaccacagcttgtggctccttgagggaggagattcagcccggcgatattgtcattattgatcagttcattgacaggaccactatgagacctcagtccttctatgatggaagtcattcttgtgccagaggagtgtgccatattccaatggctgagccgttttgccccaaaacgagagaggttcttatagagactgctaagaagctaggactccggtgccactcaaaggggacaatggtcacaatcgagggacctcgttttagctcccgggcagaaagcttcatgttccgcacctggggggcggatgttatcaacatgaccacagttccagaggtggttcttgctaaggaggctggaatttgttacgcaagtatcgccatgggcacagattatgactgctggaaggagcacgaggaagcagtttcggtggaccgggtcttaaagaccctgaaagaaaacgctaataaagccaaaagcttactgctcactaccatacctcagatagggtccacagaatggtcagaaaccctccataacctgaagaatatggcccagttttctgttttattaccaagacattaaagtagcatggctgcccaggagaaaagaagacattctaattccagtcatttgggaattcc

SEQ ID NO: 28881 - DNA, 1808 bp, Homo Sapiens
ccgaccttaccccaggcggccttgacgttggtcttgtcggcaggagacagcaccatggtgggttctctctgagtctgggaattcccgagcccgagccgcagccgccgcctggggggcttgggtcggcctcgaggacaccggagaggggcgccacgccgccgtggccgcagaaatgaccatggttgacacagagatgccattctggcccaccaactttgggatcagctccgtggatctctccgtaatggaagaccactcccactcctttgatatcaagcccttcactactgttgacttctccagcatttctactccacattacgaagacattccattcacaagaacagatccagtggttgcagattacaagtatgacctgaaacttcaagagtaccaaagtgcaatcaaagtggagcctgcatctccaccttattattctgagaagactcagctctacaataagcctcatgaagagccttccaactccctcatggcaattgaatgtcgtgtctgtggagataaagcttctggatttcactatggagttcatgcttgtgaaggatgcaagggtttcttccggagaacaatcagattgaagcttatctatgacagatgtgatcttaactgtcggatccacaaaaaaagtagaaataaatgtcagtactgtcggtttcagaaatgccttgcagtggggatgtctcataatgccatcaggtttgggcggatgccacaggccgagaaggagaagctgttggcggagatctccagtgatatcgaccagctgaatccagagtccgctgacctccgggccctggcaaaacatttgtatgactcatacataaagtccttcccgctgaccaaagcaaaggcgagggcgatcttgacaggaaagacaacagacaaatcaccattcgttatctatgacatgaattccttaatgatgggagaagataaaatcaagttcaaacacatcacccccctgcaggagcagagcaaagaggtggccatccgcatctttcagggctgccagtttcgctccgtggaggctgtgcaggagatcacagagtatgccaaaagcattcctggttttgtaaatcttgacttgaacgaccaagtaactctcctcaaatatggagtccacgagatcatttacacaatgctggcctccttgatgaataaagatggggttctcatatccgagggccaaggcttcatgacaagggagtttctaaagagcctgcgaaagccttttggtgactttatggagcccaagtttgagtttgctgtgaagttcaatgcactggaattagatgacagcgacttggcaatatttattgctgtcattattctcagtggagaccgcccaggtttgctgaatgtgaagcccattgaagacattcaagacaacctgctacaagccctggagctccagctgaagctgaaccaccctgagtcctcacagctgtttgccaagctgctccagaaaatgacagacctcagacagattgtcacggaacacgtgcagctactgcaggtgatcaagaagacggagacagacatgagtcttcacccgctcctgcaggagatctacaaggacttgtactagcagagagtcctgagccactgccaacatttcccttcttccagttgcactattctgagggaaaatctgaccataagaaatttactgtgaaaaagcgttttaaaaagaaaagggtttagaatatgatctattttatgcatattgtttataaagacacatttacaatttacttttaatattaaaaattaccatattatgaaattgc

SEQ ID NO: 28882 - DNA, 3714 bp, Homo Sapiens
gcggggcgcagagccggcccggctgccggacggtgcggccccaccaggtgaacggccatggcgggctggatccaggcccagcagctgcagggagacgcgctgcgccagatgcaggtgctgtacggccagcacttccccatcgaggtccggcactacttggcccagtggattgagagccagccatgggatgccattgacttggacaatccccaggacagagcccaagccacccagctcctggagggcctggtgcaggagctgcagaagaaggcggagcaccaggtgggggaagatgggtttttactgaagatcaagctggggcactacgccacgcagctccagaaaacatatgaccgctgccccctggagctggtccgctgcatccggcacattctgtacaatgaacagaggctggtccgagaagccaacaattgcagctctccggctgggatcctggttgacgccatgtcccagaagcaccttcagatcaaccagacatttgaggagctgcgactggtcacgcaggacacagagaatgagctgaagaaactgcagcagactcaggagtacttcatcatccagtaccaggagagcctgaggatccaagctcagtttgcccagctggcccagctgagcccccaggagcgtctgagccgggagacggccctccagcagaagcaggtgtctctggaggcctggttgcagcgtgaggcacagacactgcagcagtaccgcgtggagctggccgagaagcaccagaagaccctgcagctgctgcggaagcagcagaccatcatcctggatgacgagctgatccagtggaagcggcggcagcagctggccgggaacggcgggccccccgagggcagcctggacgtgctacagtcctggtgtgagaagttggccgagatcatctggcagaaccggcagcagatccgcagggctgagcacctctgccagcagctgcccatccccggcccagtggaggagatgctggccgaggtcaacgccaccatcacggacattatctcagccctggtgaccagcacattcatcattgagaagcagcctcctcaggtcctgaagacccagaccaagtttgcagccaccgtacgcctgctggtgggcgggaagctgaacgtgcacatgaatcccccccaggtgaaggccaccatcatcagtgagcagcaggccaagtctctgcttaaaaatgagaacacccgcaacgagtgcagtggtgagatcctgaacaactgctgcgtgatggagtaccaccaagccacgggcaccctcagtgcccacttcaggaacatgtcactgaagaggatcaagcgtgctgaccggcggggtgcagagtccgtgacagaggagaagttcacagtcctgtttgagtctcagttcagtgttggcagcaatgagcttgtgttccaggtgaagactctgtccctacctgtggttgtcatcgtccacggcagccaggaccacaatgccacggctactgtgctgtgggacaatgcctttgctgagccgggcagggtgccatttgccgtgcctgacaaagtgctgtggccgcagctgtgtgaggcgctcaacatgaaattcaaggccgaagtgcagagcaaccggggcctgaccaaggagaacctcgtgttcctggcgcagaaactgttcaacaacagcagcagccacctggaggactacagtggcctgtccgtgtcctggtcccagttcaacagggagaacttgccgggctggaactacaccttctggcagtggtttgacggggtgatggaggtgttgaagaagcaccacaagccccactggaatgatggggccatcctaggttttgtgaataagcaacaggcccacgacctgctcatcaacaagcccgacgggaccttcttgttgcgctttagtgactcagaaatcgggggcatcaccatcgcctggaagtttgactccccggaacgcaacctgtggaacctgaaaccattcaccacgcgggatttctccatcaggtccctggctgaccggctgggggacctgagctatctcatctatgtgtttcctgaccgccccaaggatgaggtcttctccaagtactacactcctgtgctggctaaagctgttgatggatatgtgaaaccacagatcaagcaagtggtccctgagtttgtgaatgcatctgcagatgctgggggcagcagcgccacgtacatggaccaggccccctccccagctgtgtgcccccaggctccctataacatgtacccacagaaccctgaccatgtactcgatcaggatggagaattcgacctggatgagaccatggatgtggccaggcacgtggaggaactcttacgccgaccaatggacagtcttgactcccgcctctcgccccctgccggtcttttcacctctgccagaggctccctctcatgaatgtttgaatcccacgcttctctttggaaacaatatgcaatgtgaagcggtcgtgttgtgagtttagtaaggttgtgtacactgacacctttgcaggcatgcatgtgcttgtgtgtgtgtgtgtgtgtgtgtccttgtgcatgagctacgcctgcctcccctgtgcagtcctgggatgtggctgcagcagcggtggcctcttttcagatcatggcatccaagagtgcgccgagtctgtctctgtcatggtagagaccgagcctctgtcactgcaggcactcaatgcagccagacctattcctcctgggcccctcatctgctcagcagctatttgaatgagatgattcagaaggggaggggagacaggtaacgtctgtaagctgaagtttcactccggagtgagaagctttgccctcctaagagagagagacagagagacagagagagagaaagagagagtgtgtgggtctatgtaaatgcatctgtcctcatgtgttgatgtaaccgattcatctctcagaagggaggctgggggttcattttcgagtagtattttatactttagtgaacgtggactccagactctctgtgaaccctatgagagcgcgtctgggcccggccatgtccttagcacaggggggccgccggtttgagtgagggtttctgagctgctctgaattagtccttgcttggctgcttggccttgggcttcattcaagtctatgatgctgttgcccacgtttcccgggatatatattctctcccctccgttgggccccagccttctttgcttgcctctctgtttgtaaccttgtcgacaaagaggtagaaaagattgggtctaggatatggtgggtggacaggggccccgggacttggagggttggtcctcttgcctcctggaaaaaacaaaaacaaaaaactgcagtgaaagacaagctgcaaatcagccatgtgctgcgtgcctgtggaatctggagtgaggggtaaaagctgatctggtttgactccgctggaggtggggcctggagcaggccttgcgctgttgcgtaactggctgtgttctggtgaggccttgctcccaaccccacacgctcctccctctgaggctgtaggactcgcagtcaggggcagctgaccatggaagattgagagcccaaggtttaaacttctctgaagggaggtggggatgagaagaggggtttttttgtactttgtacaaagaccacacatttgtgtaaacagtgttttggaataaaatatttttttcat

SEQ ID NO: 28883 - DNA, 1863 bp, Homo Sapiens
tgtctgcaccggcagcaccatgtcgctcacggtcgtcagcatggcgtgcgttgggttcttcttgctgcagggggcctggccactcatgggtggtcaggacaaacccttcctgtctgcccggcccagcactgtggtgcctcgaggaggacacgtggctcttcagtgtcactatcgtcgtgggtttaacaatttcatgctgtacaaagaagacagaagccacgttcccatcttccacggcagaatattccaggagagcttcatcatgggccctgtgaccccagcacatgcagggacctacagatgtcggggttcacgcccacactccctcactgggtggtcggcacccagcaaccccctggtgatcatggtcacaggaaaccacagaaaaccttccctcctggcccacccagggcccctgctgaaatcaggagagacagtcatcctgcaatgttggtcagatgtcatgtttgagcacttctttctgcacagagaggggatctctgaggacccctcacgcctcgttggacagatccatgatggggtctccaaggccaacttctccatcggtcccttgatgcctgtccttgcaggaacctacagatgttatggttctgttcctcactccccctatcagttgtcagctcccagtgaccccctggacatcgtgatcacaggtctatatgagaaaccttctctctcagcccagccgggccccacggttcaggcaggagagaacgtgaccttgtcctgtagctcctggagctcctatgacatctaccatctgtccagggaaggggaggcccatgaacgtaggctccgtgcagtgcccaaggtcaacagaacattccaggcagactttcctctgggccctgccacccacggagggacctacagatgcttcggctctttccgtgccctgccctgcgtgtggtcaaactcaagtgacccactgcttgtttctgtcacaggaaacccttcaagtagttggccttcacccacagaaccaagctccaaatctggtatctgcagacacctgcatgttctgattgggacctcagtggtcatcttcctcttcatcctcctcctcttctttctcctttatcgctggtgctccaacaaaaagaatgctgctgtaatggaccaagagcctgcgggggacagaacagtgaataggcaggactctgatgaacaagaccctcaggaggtgacgtacgcacagttggatcactgcgttttcatacagagaaaaatcagtcgcccttctcagaggcccaagacacccctaacagataccagcgtgtacacggaacttccaaatgctgagcccagatccaaagttgtctcctgcccacgagcaccacagtcaggtcttgagggggttttctagggagacaacagccctgtctcaaaaccaggttgccagatccaatgaaccagcagctggaatctgaaggcatcagtctgcatcttaggggatcgctcttcctcacaccacgaatctgaacatgcctctctcttgcttacaaatgcctaaggtcgccactgcctgctgcagagaaaacacactcctttgcttagcccacaagtatctatttcacttgacccctgcccacctctccaacctaactggcttacttcctagtcctacttgaggctgcaatcacactgaggaactcacaattccaaacatacaagaggctccctcttaacacggcacttacacacttgctgttccaccttccctcatgctgttccacctcccctcagactatctttcagccttctgtcatcagtaaaatttataaattttttttataacttcagtgtagctctctcctcttcaaataaacatgtctgccctca

SEQ ID NO: 28884 - DNA, 4839 bp, Homo Sapiens
tccggtttttctcaggggacgttgaaattatttttgtaacgggagtcgggagaggacggggcgtgccccgcgtgcgcgcgcgtcgtcctccccggcgctcctccacagctcgctggctcccgccgcggaaaggcgtcatgccgcccaaaaccccccgaaaaacggccgccaccgccgccgctgccgccgcggaacccccggcaccgccgccgccgccccctcctgaggaggacccagagcaggacagcggcccggaggacctgcctctcgtcaggcttgagtttgaagaaacagaagaacctgattttactgcattatgtcagaaattaaagataccagatcatgtcagagagagagcttggttaacttgggagaaagtttcatctgtggatggagtattgggaggttatattcaaaagaaaaaggaactgtggggaatctgtatctttattgcagcagttgacctagatgagatgtcgttcacttttactgagctacagaaaaacatagaaatcagtgtccataaattctttaacttactaaaagaaattgataccagtaccaaagttgataatgctatgtcaagactgttgaagaagtatgatgtattgtttgcactcttcagcaaattggaaaggacatgtgaacttatatatttgacacaacccagcagttcgatatctactgaaataaattctgcattggtgctaaaagtttcttggatcacatttttattagctaaaggggaagtattacaaatggaagatgatctggtgatttcatttcagttaatgctatgtgtccttgactattttattaaactctcacctcccatgttgctcaaagaaccatataaaacagctgttatacccattaatggttcacctcgaacacccaggcgaggtcagaacaggagtgcacggatagcaaaacaactagaaaatgatacaagaattattgaagttctctgtaaagaacatgaatgtaatatagatgaggtgaaaaatgtttatttcaaaaattttataccttttatgaattctcttggacttgtaacatctaatggacttccagaggttgaaaatctttctaaacgatacgaagaaatttatcttaaaaataaagatctagatgcaagattatttttggatcatgataaaactcttcagactgattctatagacagttttgaaacacagagaacaccacgaaaaagtaaccttgatgaagaggtgaatgtaattcctccacacactccagttaggactgttatgaacactatccaacaattaatgatgattttaaattcagcaagtgatcaaccttcagaaaatctgatttcctattttaacaactgcacagtgaatccaaaagaaagtatactgaaaagagtgaaggatataggatacatctttaaagagaaatttgctaaagctgtgggacagggttgtgtcgaaattggatcacagcgatacaaacttggagttcgcttgtattaccgagtaatggaatccatgcttaaatcagaagaagaacgattatccattcaaaattttagcaaacttctgaatgacaacatttttcatatgtctttattggcgtgcgctcttgaggttgtaatggccacatatagcagaagtacatctcagaatcttgattctggaacagatttgtctttcccatggattctgaatgtgcttaatttaaaagcctttgatttttacaaagtgatcgaaagttttatcaaagcagaaggcaacttgacaagagaaatgataaaacatttagaacgatgtgaacatcgaatcatggaatcccttgcatggctctcagattcacctttatttgatcttattaaacaatcaaaggaccgagaaggaccaactgatcaccttgaatctgcttgtcctcttaatcttcctctccagaataatcacactgcagcagatatgtatctttctcctgtaagatctccaaagaaaaaaggttcaactacgcgtgtaaattctactgcaaatgcagagacacaagcaacctcagccttccagacccagaagccattgaaatctacctctctttcactgttttataaaaaagtgtatcggctagcctatctccggctaaatacactttgtgaacgccttctgtctgagcacccagaattagaacatatcatctggacccttttccagcacaccctgcagaatgagtatgaactcatgagagacaggcatttggaccaaattatgatgtgttccatgtatggcatatgcaaagtgaagaatatagaccttaaattcaaaatcattgtaacagcatacaaggatcttcctcatgctgttcaggagacattcaaacgtgttttgatcaaagaagaggagtatgattctattatagtattctataactcggtcttcatgcagagactgaaaacaaatattttgcagtatgcttccaccaggccccctaccttgtcaccaatacctcacattcctcgaagcccttacaagtttcctagttcacccttacggattcctggagggaacatctatatttcacccctgaagagtccatataaaatttcagaaggtctgccaacaccaacaaaaatgactccaagatcaagaatcttagtatcaattggtgaatcattcgggacttctgagaagttccagaaaataaatcagatggtatgtaacagcgaccgtgtgctcaaaagaagtgctgaaggaagcaaccctcctaaaccactgaaaaaactacgctttgatattgaaggatcagatgaagcagatggaagtaaacatctcccaggagagtccaaatttcagcagaaactggcagaaatgacttctactcgaacacgaatgcaaaagcagaaaatgaatgatagcatggatacctcaaacaaggaagagaaatgaggatctcaggaccttggtggacactgtgtacacctctggattcattgtctctcacagatgtgactgtataactttcccaggttctgtttatggccacatttaatatcttcagctctttttgtggatataaaatgtgcagatgcaattgtttgggtgattcctaagccacttgaaatgttagtcattgttatttatacaagattgaaaatcttgtgtaaatcctgccatttaaaaagttgtagcagattgtttcctcttccaaagtaaaattgctgtgctttatggatagtaagaatggccctagagtgggagtcctgataacccaggcctgtctgactactttgccttcttttgtagcatataggtgatgtttgctcttgtttttattaatttatatgtatatttttttaatttaacatgaacacccttagaaaatgtgtcctatctatcttccaaatgcaatttgattgactgcccattcaccaaaattatcctgaactcttctgcaaaaatggatattattagaaattagaaaaaaattactaattttacacattagattttattttactattggaatctgatatactgtgtgcttgttttataaaattttgcttttaattaaataaaagctggaagcaaagtataaccatatgatactatcatactactgaaacagatttcatacctcagaatgtaaaagaacttactgattattttcttcatccaacttatgtttttaaatgaggattattgatagtactcttggtttttataccattcagatcactgaatttataaagtacccatctagtacttgaaaaagtaaagtgttctgccagatcttaggtatagaggaccctaacacagtatatcccaagtgcactttctaatgtttctgggtcctgaagaattaagatacaaattaattttactccataaacagactgttaattataggagccttaatttttttttcatagagatttgtctaattgcatctcaaaattattctgccctccttaatttgggaaggtttgtgttttctctggaatggtacatgtcttccatgtatcttttgaactggcaattgtctatttatcttttatttttttaagtcagtatggtctaacactggcatgttcaaagccacattatttctagtccaaaattacaagtaatcaagggtcattatgggttaggcattaatgtttctatctgattttgtgcaaaagcttcaaattaaaacagctgcattagaaaaagaggcgcttctcccctcccctacacctaaaggtgtatttaaactatcttgtgtgattaacttatttagagatgctgtaacttaaaataggggatatttaaggtagcttcagctagcttttaggaaaatcactttgtctaactcagaattatttttaaaaagaaatctggtcttgttagaaaacaaaattttattttgtgctcatttaagtttcaaacttactattttgacagttattttgataacaatgacactagaaaacttgactccatttcatcattgtttctgcatgaatatcatacaaatcagttagtttttaggtcaagggcttactatttctgggtcttttgctactaagttcacattagaattagtgccagaattttaggaacttcagagatcgtgtattgagatttcttaaataatgcttcagatattattgctttattgcttttttgtattggttaaaactgtacatttaaaattgctatgttactattttctacaattaatagtttgtctattttaaaataaattagttgttaagagtcttaatggtctgatgttgtgttctttgtattaagtacactaatgttctcttttctgtctaggagaagatagatagaagataactctcctagtatctcatcc

SEQ ID NO: 28885 - DNA, 3129 bp, Homo Sapiens
cccgcactaaagacgcttcttcccggcgggtaggaatcccgccggcgagccgaacagttccccgagcgcagcccgcggaccaccacccggccgcacgggccgcttttgtcccccgcccgccgcttctgtccgagaggccgcccgcgaggcgcatcctgaccgcgagcgtcgggtcccagagccgggcgcggctggggcccgaggctagcatctctcgggagccgcaaggcgagagctgcaaagtttaattagacacttcagaattttgatcacctaatgttgatttcagatgtaaaagtcaagagaagactctaaaaatagcaaagatgcttttgagccagaatgccttcatcttcagatcacttaatttggttctcatggtgtatatcagcctcgtgtttggtatttcatatgattcgcctgattacacagatgaatcttgcactttcaagatatcattgcgaaatttccggtccatcttatcatgggaattaaaaaaccactccattgtaccaactcactatacattgctgtatacaatcatgagtaaaccagaagatttgaaggtggttaagaactgtgcaaataccacaagatcattttgtgacctcacagatgagtggagaagcacacacgaggcctatgtcaccgtcctagaaggattcagcgggaacacaacgttgttcagttgctcacacaatttctggctggccatagacatgtcttttgaaccaccagagtttgagattgttggttttaccaaccacattaatgtgatggtgaaatttccatctattgttgaggaagaattacagtttgatttatctctcgtcattgaagaacagtcagagggaattgttaagaagcataaacccgaaataaaaggaaacatgagtggaaatttcacctatatcattgacaagttaattccaaacacgaactactgtgtatctgtttatttagagcacagtgatgagcaagcagtaataaagtctcccttaaaatgcaccctccttccacctggccaggaatcagaatcagcagaatctgccaaaataggaggaataattactgtgtttttgatagcattggtcttgacaagcaccatagtgacactgaaatggattggttatatatgcttaagaaatagcctccccaaagtcttgaggcaaggtctcgctaagggctggaatgcagtggctattcacaggtgcagtcataatgcactacagtctgaaactcctgagctcaaacagtcgtcctgcctaagcttccccagtagctgggattacaagcgtgcatccctgtgccccagtgattaagttttattatgtagaaaataaagagcaaacagtacagctgatatggactctctctctctttttttttttttttaagaattttcataactttttagcctggccatttcctaacctgccaccgttggaagccatggatatggtggaggtcatttacatcaacagaaagaagaaagtgtgggattataattatgatgatgaaagtgatagcgatactgaggcagcgcccaggacaagtggcggtggctataccatgcatggactgactgtcaggcctctgggtcaggcctctgccacctctacagaatcccagttgatagacccggagtccgaggaggagcctgacctgcctgaggttgatgtggagctccccacgatgccaaaggacagccctcagcagttggaactcttgagtgggccctgtgagaggagaaagagtccactccaggacccttttcccgaagaggactacagctccacggaggggtctgggggcagaattaccttcaatgtggacttaaactctgtgtttttgagagttcttgatgacgaggacagtgacgacttagaagcccctctgatgctatcgtctcatctggaagagatggttgacccagaggatcctgataatgtgcaatcaaaccatttgctggccagcggggaagggacacagccaacctttcccagcccctcttcagagggcctgtggtccgaagatgctccatctgatcaaagtgacacttctgagtcagatgttgaccttggggatggttatataatgagatgactccaaaactattgaatgaacttggacagacaagcacctacagggttctttgtctctgcatcctaacttgctgccttatcgtctgcaagtgttctccaagggaaggaggaggaaactgtggtgttcctttcttccaggtgacatcacctatgcacattcccagtatggggaccatagtatcattcagtgcattgtttacatattcaaagtggtgcactttgaaggaagcacatgtgcacctttcctttacactaatgcacttaggatgtttctgcatcatgtctaccagggagcagggttccccacagtttcagaggtggtccaggaccctatgatatttctcttctttcgttcttttttttttttttttgagacagagtctcgttctgtcgcccaagctggagcgcaatggtgtgatcttggctcactgcaacatccgcctcccgggttcaggtgattctcctgcctcagcctccctcgcaagtagctgggattacaggcgcctgccaccatgcctagcaaatttttgtatttttagtggagacaggattttaccatgttggccaggctggtctcgaactcctgacctcaagtgatctgccctcctcagcctcgtaaagtgctgggattacaggggtgagccgctgtgcctggctggccctgtgatatttctgtgaaataaattgggccagggtgggagcagggaaagaaaaggaaaatagtagcaagagctgcaaagcaggcaggaagggaggaggagagccaggtgagcagtggagagaaggggggccctgcacaaggaaacagggaagagccatcgaagtttcagtcggtgagccttgggcacctcacccatgtcacatcctgtctcctgcaattggaattccaccttgtccagccctccccagttaaagtggggaagacagactttaggatcacgtgtgtgactaatacagaaaggaaacatggcgtcggggagagggataaaacctgaatgccatattttaagttaaaaaaaaaaaa

SEQ ID NO: 28886 - DNA, 2448 bp, Homo Sapiens
ccgtcgccctccctacgggcagcccccgggggttggcgaccgaagtctaggttttcgagaaagccagggtgggaaccctaactggactcttcgggacccccaggaaggatctgaggcctgagccatcctcctttctaccctgtctgccccccaggactgggcagttgcaggaggccctgggggggggcccaggactgtggttgtgccccccccccaaaggccggacaggatgggaccaagttagtctgtccagtctcacccagcacctcccaggcccagagagaacccccggggctctgaaagcttgccctgccgcctgaccgccatggagacgaagctgccccctgcaagcacccccactagcccctcctcccccgggctgtcgcctgtgcccccacccgacaaggtggacggcttctcccgccgttccctccgcagagcccggccccgccgctcccacagctcctctcagttccgctatcagagcaaccagcaagagctcacaccgctgcccctgctcaaagatgtgccggcttccgagctgcacgagctgctgagccggaagctggcccagtgtggggtgatgtttgacttcttggactgtgtggccgacctcaaggggaaggaggtgaagcgggcagccctcaacgagctggtggagtgtgtggggagcacccggggtgtcctcatcgagcccgtctacccagacatcatccgcatgatctcagtgaatatcttccggactctgccgcccagtgagaaccctgaatttgaccctgaagaggatgagcccaatcttgagccttcgtggccacacctgcagctggtatatgagtttttcctgcgtttcttggagagcccagacttccagccctccgtggccaagagatatgtggatcaaaagtttgtcctgatgctcctggagctatttgatagtgaggatccccgggagcgtgagtacctcaagaccatcctgcaccgggtctatggcaagttcctgggtctccgggcctacatccgcaaacagtgcaaccacatcttcctccggttcatctatgaattcgagcacttcaatggtgtggctgagctgctggagatcctaggaagcatcatcaatggctttgcgctgcccctgaagacggagcacaagcagttcctggttcgcgtcctgatccccctgcactctgtcaagtcgctgtctgtcttccatgcccagctggcatactgtgtggtgcagttcctggagaaggatgccactctgacagagcacgtgatccgggggctgctcaaatactggccaaaaacctgcacccagaaggaggtgatgtttctgggggagatggaagagattcttgatgtcatcgagccctcccagtttgtgaagatccaggagcccctttttaagcaggtggctcgctgtgtttccagcccccatttccaggttgcagagcgggctctgtatttctggaacaatgagtatatcctaagcctcattgaggacaactgccacactgtgctgcctgctgtgtttgggaccctctaccaagtctccaaggagcactggaaccaaaccatcgtatcactgatctacaatgtgctcaagaccttcatggagatgaatgggaagctgtttgatgagctcacagcctcctacaagctggaaaagcagcaggagcagcagaaggcccaggagcgtcaggagttatggcaaggtctggaggagctgcggctacgccggctacaggggacccagggggccaaggaggcccccctccagcggcttacaccccaggtggccgccagtgggggtcagagctagacagcacctcagaaggggaaaagctaaacccagagctgtcagtccctctatcccttctcctgtccaggggcccagagagaaacacacctacccctggccttgccagagtggcttctgaggactcccagcccagcccagctttcactggggggagacgaggagaggcaatggtggtcttggcaacagaatgctcagcccctcgtggcaggacttgacaagggcaagcttgaccaggaagctgccatcagggatcttcccctgccccgcaaagctaggctccagctgcaggcgggctcccaccctctgctcctggccttgggcaagggcactcagcgcctcgcctgcccctgccttggccaatgcgaggtccttccttatccccaccatggggtccatggtctatttattctcgcccagctcaccctctacacagacactgtcctgggtgcacactcctcccttccctcgctgtgtacttccttgtcccctttttatttattgggcagggggagggggagggcacaggcaagaagagattcacagtgtcctggggtaagggggggttcacagtaatcatggtctactcctctttccgtggctgggggtagacttaataaagagagaaattc

SEQ ID NO: 28887 - DNA, 1630 bp, Homo Sapiens
ccggggctgcgatgagcccctgcgggcgggcccggcgacaaacgtccagaggggccatggctgtactggcgtggaagttcccgcggacccggctgcccatgggagccagtgccctctgtgtcgtggtcctctgttggctctacatcttccccgtctaccggctgcccaacgagaaagagatcgtgcagggggtgctgcaacagggcacggcgtggaggaggaaccagaccgcggccagagcgttcaggaaacaaatggaagactgctgcgaccctgcccatctctttgctatgactaaaatgaattcccctatggggaagagcatgtggtatgacggggagtttttatactcattcaccattgacaattcaacttactctctcttcccacaggcaaccccattccagctgccattgaagaaatgcgcggtggtgggaaatggtgggattctgaagaagagtggctgtggccgtcaaatagatgaagcaaattttgtcatgcgatgcaatctccctcctttgtcaagtgaatacactaaggatgttggatccaaaagtcagttagtgacagctaatcccagcataattcggcaaaggtttcagaaccttctgtggtccagaaagacatttgtggacaacatgaaaatctataaccacagttacatctacatgcctgccttttctatgaagacaggaacagagccatctttgagggtttattatacactgtcagatgttggtgccaatcaaacagtgctgtttgccaaccccaactttctgcgtagcattggaaagttctggaaaagtagaggaatccatgccaagcgcctgtccacaggactttttctggtgagcgcagctctgggtctctgtgaagaggtggccatctatggcttctggcccttctctgtgaatatgcatgagcagcccatcagccaccactactatgacaacgtcttacccttttctggcttccatgccatgcccgaggaatttctccaactctggtatcttcataaaatcggtgcactgagaatgcagctggacccatgtgaagatacctcactccagcccacttcctaggaacaatggaagaagaaaggactgaaccagggtatttttgttaggttttctatgtgactccaagagggaatggtcaagttgtttcatgagtttgcatgggcccttggaaaaacaggaaaggagcaatgaagatccaagcaaaactttactttcagcgttggcttggaggacaaataagaaatgaaacatcctatgaaatactttatagcacatggcagatttgcaactagtaaaatgctggtgaaatgctgttggtaaagcacatggttcaaatctagaagatgcagttcaaaaacaagacagactcgagttgttagggctgaggaaccaatcaaggtagaacaaagaaaatgttggggtaaaagtgttgctgattgtcaacacaaactggcttaataatattaataagaacctgtcttattaagactggctttagaaccgtaggtttttttaaaaaattattatttatttttgccctctttggggaagtgggtgggtagatttaaaaaatcccttcctgagtaataaagatacaaaatgttactgct

SEQ ID NO: 28888 - DNA, 1237 bp, Homo Sapiens
catctgtcactggccaccggtttccgggagtaagcggcagctaccttacagccctgacacgagccgggtgctctctcttctcaccgcggcccacgtctcctcgctggctccggtggcctcgctgggtcgcgaggaggcggaggactgtactctgaggccaaaagccagagtcggccctgaacgcccacgactctcagggtccagaggccgtgagaccggccgcggctgaaaggtaaagaaaccaagtggaagagtgtttcctcctctggccgtaaagcagctgtccccgccctactccggaccgccccaaagactccatgggatggacctgagtcagccgaatcctagccccttcccttgggcctgctgtggtgctcgacatcagtgacagacggaagcagcagaccatcaaggctacgggaggcccggggcgcttgcgaagatgaagtttggctgcctctccttccggcagccttatgctggctttgtcttaaatggaatcaagactgtggagacgcgctggcgtcctctgctgagcagccagcggaactgtaccatcgccgtccacattgctcacagggactgggaaggcgatgcctgtcgggagctgctggtggagagactcgggatgactcctgctcagattcaggccttgctcaggaaaggggaaaagtttggtcgaggagtgatagcgggactcgttgacattggggaaactttgcaatgccccgaagacttaactcccgatgaggttgtggaactagaaaatcaagctgcactgaccaacctgaagcagaagtacctgactgtgatttcaaaccccaggtggttactggagcccatacctaggaaaggaggcaaggatgtattccaggtagacatcccagagcacctgatccctttggggcatgaagtgtgacaagtgtgggctcctgaaaggaatgttccagagaaaccagctaaatcatggcaccttcaatttgccatcgtgacgcagacctgtataaattaggttaaagatgaatttccactgctttggagagtcccacccactaagcactgtgcatgtaaacaggttcctttgctcagatgaaggaagtagggggtggggctttccttgtgtgatgcctccttaggcacacaggcaatgtctcaagtactttgaccttagggtagaaggcaaagctgccagtaaatgtctcagcattgctgctaattttggtcctgctagtttctg

SEQ ID NO: 28889 - DNA, 2236 bp, Homo Sapiens
cgagcggcggcggagcaggcatttccagcagtgaggagacagccagaagcaagctattggagctgaaggaacctgagacagaagctagtcccccctctgaattttactgatgaagaaactgaggccacagagctaaagtgacttttcccaaggtcgcccagcgaggacgtgggacttctcagacgtcaggagagtgatgtgagggagctgtgtgaccatagaaagtgacgtgttaaaaaccagcgctgccctctttgaaagccagggagcatcattcatttagcctgctgagaagaagaaaccaagtgtccgggattcagacctctctgcggccccaagtgttcgtggtgcttccagaggcagggctatgctcacattcatggcctctgacagcgaggaagaagtgtgtgatgagcggacgtccctaatgtcggccgagagccccacgccgcgctcctgccaggagggcaggcagggcccagaggatggagagaacactgcccagtggagaagccaggagaacgaggaggacggtgaggaggaccctgaccgctatgtctgtagtggggttcccgggcggccgccaggcctggaggaagagctgaccctcaaatacggagcgaagcacgtgatcatgctgtttgtgcctgtcactctgtgcatgatcgtggtggtagccaccatcaagtctgtgcgcttctacacagagaagaatggacagctcatctacacgacattcactgaggacacaccctcggtgggccagcgcctcctcaactccgtgctgaacaccctcatcatgatcagcgtcatcgtggttatgaccatcttcttggtggtgctctacaagtaccgctgctacaagttcatccatggctggttgatcatgtcttcactgatgctgctgttcctcttcacctatatctaccttggggaagtgctcaagacctacaatgtggccatggactaccccaccctcttgctgactgtctggaacttcggggcagtgggcatggtgtgcatccactggaagggccctctggtgctgcagcaggcctacctcatcatgatcagtgcgctcatggccctagtgttcatcaagtacctcccagagtggtccgcgtgggtcatcctgggcgccatctctgtgtatgatctcgtggctgtgctgtgtcccaaagggcctctgagaatgctggtagaaactgcccaggagagaaatgagcccatattccctgccctgatatactcatctgccatggtgtggacggttggcatggcgaagctggacccctcctctcagggtgccctccagctcccctacgacccggagatggaagaagactcctatgacagttttggggagccttcataccccgaagtctttgagcctcccttgactggctacccaggggaggagctggaggaagaggaggaaaggggcgtgaagcttggcctcggggacttcatcttctacagtgtgctggtgggcaaggcggctgccacgggcagcggggactggaataccacgctggcctgcttcgtggccatcctcattggcttgtgtctgaccctcctgctgcttgctgtgttcaagaaggcgctgcccgccctccccatctccatcacgttcgggctcatcttttacttctccacggacaacctggtgcggccgttcatggacaccctggcctcccatcagctctacatctgagggacatggtgtgccacaggctgcaagctgcagggaattttcattggatgcagttgtatagttttacactctagtgccatatatttttaagacttttctttccttaaaaaataaagtacgtgtttacttggtgaggaggaggcagaaccagctctttggtgccagctgtttcatcaccagactttggctcccgctttggggagcgcctcgcttcacggacaggaagcacagcaggtttatccagatgaactgagaaggtcagattagggcggggagaagagcatccggcatgagggctgagatgcgcaaagagtgtgctcgggagtggcccctggcacctgggtgctctggctggagaggaaaagccagttccctacgaggagtgttcccaatgctttgtccatgatgtccttgttattttattgcctttagaaactgagtcctgttcttgttacggcagtcacactgctgggaagtggcttaatagtaatatcaataaatagatgagtcctgttagaaaaa

SEQ ID NO: 28890 - DNA, 3590 bp, Homo Sapiens
cgcggacccggccggcccaggcccgcgcccgccgcggccctgagaggccccggcaggtcccggcccggcggcggcagccatggccggggggccgggcccgggggagcccgcagcccccggcgcccagcacttcttgtacgaggtgccgccctgggtcatgtgccgcttctacaaagtgatggacgccctggagcccgccgactggtgccagttcgccgccctgatcgtgcgcgaccagaccgagctgcggctgtgcgagcgctccgggcagcgcacggccagcgtcctgtggccctggatcaaccgcaacgcccgtgtggccgacctcgtgcacatcctcacgcacctgcagctgctccgtgcgcgggacatcatcacagcctggcaccctcccgccccgcttccgtccccaggcaccactgccccgaggcccagcagcatccctgcacccgccgaggccgaggcctggagcccccggaagttgccatcctcagcctccaccttcctctccccagcttttccaggctcccagacccattcagggcctgagctcggcctggttccaagccctgcttccctgtggcctccaccgccatctccagccccttcttctaccaagccaggcccagagagctcagtgtccctcctgcagggagcccgcccctctccgttttgctggcccctctgtgagatttcccggggcacccacaacttctcggaggagctcaagatcggggagggtggctttgggtgcgtgtaccgggcggtgatgaggaacacggtgtatgctgtgaagaggctgaaggagaacgctgacctggagtggactgcagtgaagcagagcttcctgaccgaggtggagcagctgtccaggtttcgtcacccaaacattgtggactttgctggctactgtgctcagaacggcttctactgcctggtgtacggcttcctgcccaacggctccctggaggaccgtctccactgccagacccaggcctgcccacctctctcctggcctcagcgactggacatccttctgggtacagcccgggcaattcagtttctacatcaggacagccccagcctcatccatggagacatcaagagttccaacgtccttctggatgagaggctgacacccaagctgggagactttggcctggcccggttcagccgctttgccgggtccagccccagccagagcagcatggtggcccggacacagacagtgcggggcaccctggcctacctgcccgaggagtacatcaagacgggaaggctggctgtggacacggacaccttcagctttggggtggtagtgctagagaccttggctggtcagagggctgtgaagacgcacggtgccaggaccaagtatctgaaagacctggtggaagaggaggctgaggaggctggagtggctttgagaagcacccagagcacactgcaagcaggtctggctgcagatgcctgggctgctcccatcgccatgcagatctacaagaagcacctggaccccaggcccgggccctgcccacctgagctgggcctgggcctgggccagctggcctgctgctgcctgcaccgccgggccaaaaggaggcctcctatgacccaggtgtacgagaggctagagaagctgcaggcagtggtggcgggggtgcccgggcatttggaggccgccagctgcatccccccttccccgcaggagaactcctacgtgtccagcactggcagagcccacagtggggctgctccatggcagcccctggcagcgccatcaggagccagtgcccaggcagcagagcagctgcagagaggccccaaccagcccgtggagagtgacgagagcctaggcggcctctctgctgccctgcgctcctggcacttgactccaagctgccctctggacccagcacccctcagggaggccggctgtcctcagggggacacggcaggagaatcgagctgggggagtggcccaggatcccggcccacagccgtggaaggactggcccttggcagctctgcatcatcgtcgtcagagccaccgcagattatcatcaaccctgcccgacagaagatggtccagaagctggccctgtacgaggatggggccctggacagcctgcagctgctgtcgtccagctccctcccaggcttgggcctggaacaggacaggcaggggcccgaagaaagtgatgaatttcagagctgatgtgttcacctgggcagatcccccaaatccggaagtcaaagttctcatggtcagaagttctcatggtgcacgagtcctcagcactctgccggcagtgggggtgggggcccatgcccgcgggggagagaaggaggtggccctgctgttctaggctctgtgggcataggcaggcagagtggaaccctgcctccatgccagcatctgggggcaaggaaggctggcatcatccagtgaggaggctggcgcatgttgggaggctgctggctgcacagacccgtgaggggaggagaggggctgctgtgcaggggtgtggagtagggagctggctcccctgagagccatgcagggcgtctgcagcccaggcctctggcagcagctctttgcccatctctttggacagtggccaccctgcacaatggggccgacgaggcctagggccctcctacctgcttacaatttggaaaagtgtggccgggtgcggtggctcacgcctgtaatcccagcactttgggaggccaaggcaggaggatcgctggagcccagtaggtcaagaccagccagggcaacatgatgagaccctgtctctgccaaaaaattttttaaactattagcctggcgtggtagcgcacgcctgtggtcccagctgctggggaggctgaagtaggaggatcatttatgcttgggaggtcgaggctgcagtgagtcatgattgtatgactgcactccagcctgggtgacagagcaagaccctgtttcaaaaagaaaaaccctgggaaaagtgaagtatggctgtaagtctcatggttcagtcctagcaagaagcgagaattctgagatcctccagaaagtcgagcagcacccacctccaacctcgggccagtgtcttcaggctttactggggacctgcgagctggcctaatgtggtggcctgcaagccaggccatccctgggcgccacagacgagctccgagccaggtcaggcttcggaggccacaagctcagcctcaggcccaggcactgattgtggcagaggggccactacccaaggtctagctaggcccaagacctagttacccagacagtgagaagcccctggaaggcagaaaagttgggagcatggcagacagggaagggaaacattttcagggaaaagacatgtatcacatgtcttcagaagcaagtcaggtttcatgtaaccgagtgtcctcttgcgtgtccaaaagtagcccagggctgtagcacaggcttcacagtgattttgtgttcagccgtgagtcacactacatgcccccgtgaagctgggcattggtgacgtccaggttgtccttgagtaataaaaacgtatgttccctaaaaaaaaaaaaaggaattc

SEQ ID NO: 28891 - DNA, 3995 bp, Homo Sapiens
atgggtggggccctggggccggccctgttgctcacctcgctcttcggtgcctgggcagggctgggtccggggcagggcgagcagggcatgacggtggccgtggtgtttagcagctcagggccgccccaggcccagttccgtgcccgcctcaccccccagagcttcctggacctacccctggagatccagccgctcacagttggggtcaacaccaccaaccccagcagcctcctcacccagatctgcggcctcctgggtgctgcccacgtccacggcattgtctttgaggacaacgtggacaccgaggcggtggcccagatccttgacttcatctcctcccagacccatgtgcccatcctcagcatcagcggaggctctgctgtggtcctcacccccaaggagccgggctccgccttcctgcagctgggcgtgtccctggagcagcagctgcaggtgctgttcaaggtgctggaagagtacgactggagcgccttcgccgtcatcaccagcctgcacccgggccacgcgctcttcctggagggcgtgcgcgccgtcgccgacgccagccacgtgagttggcggctgctggacgtggtcacgctggagctgggcccgggagggccgcgcgcgcgcacgcagcgcctgctgcgccagctcgacgcgcccgtgtttgtggcctactgctcgcgcgaggaggccgaggtgctcttcgccgaggcggcgcaggccggtctggtggggcccggccacgtgtggttggtgcccaacctggcgctgggcagcaccgatgcgccccccgccaccttccccgtgggcctcatcagcgtcgtcaccgagagctggcgcctcagcctgcgccagaaggtgcgcgacggcgtggccattctggccctgggcgcccacagctactggcgccagcatggaaccctgccagccccggccggggactgccgtgttcaccctgggcccgtcagccctgcccgggaggccttctacaggcacctactgaatgtcacctgggagggccgagacttctccttcagccctggtgggtacctggtccagcccaccatggtggtgatcgccctcaaccggcaccgcctctgggagatggtggggcgctgggagcatggcgtcctatacatgaagtaccccgtgtggcctcgctacagtgcctctctgcagcctgtggtggacagtcggcacctgacggtggccacgctggaagagcggccctttgtcatcgtggagagccctgaccctggcacaggaggctgtgtccccaacaccgtgccctgccgcaggcagagcaaccacaccttcagcagcggggacgtggccccctacaccaagctctgctgtaagggattctgcatcgacatcctcaagaagctggccagagtggtcaaattctcctacgacctgtacctggtgaccaacggcaagcatggcaagcgggtgcgcggcgtatggaacggcatgattggggaggtgtactacaagcgggcagacatggccatcggctccctcaccatcaatgaggaacgctccgagatcgtagacttctctgtaccctttgtggagacgggcatcagtgtgatggtggctcgcagcaatggcaccgtctccccctcggccttcttggagccatatagccctgcagtgtgggtgatgatgtttgtcatgtgcctcactgtggtggccatcaccgtcttcatgttcgagtacttcagccctgtcagctacaaccagaacctcaccagaggcaagaagtccgggggcccagctttcactatcggcaagtccgtgtggctgctgtgggcgctggtcttcaacaactcagtgcccatcgagaacccgcggggcaccaccagcaagatcatggttctggtctgggccttctttgctgtcatcttcctcgccagctacacggccaacctggccgccttcatgatccaagagcaatacatcgacactgtgtcgggcctcagtgacaagaagtttcagcggcctcaagatcagtacccacctttccgcttcggcacggtgcccaacggcagcacggagcggaacatccgcagtaactaccgtgacatgcacacccacatggtcaagttcaaccagcgctcggtggaggacgcgctcaccagcctcaagatggggaagctggatgccttcatctatgatgctgctgtcctcaactacatggcaggcaaggacgagggctgcaagctggtcaccattgggtctggcaaggtctttgctaccactggctacggcatcgccatgcagaaggactcccactggaagcgggccatagacctggcgctcttgcagttcctgggggacggagagacacagaaactggagacagtgtggctctcagggatctgccagaatgagaagaacgaggtgatgagcagcaagctggacatcgacaacatggcaggcgtcttctacatgctgctggtggccatggggctggccctgctggtcttcgcctgggagcacctggtctactggaagctgcgccactcggtgcccaactcatcccagctggacttcctgctggctttcagcaggggcatctacagctgcttcagcggggtgcagagcctcgccagcccaccgcggcaggccagcccggacctcacggccagctcggcccaggccagcgtgctcaagatgctgcaggcagcccgcgacatggtgaccacggcgggcgtaagcagctccctggaccgcgccactcgcaccatcgagaattggggtggcggccgccgtgcgcccccaccgtccccctgcccgaccccgcggtctggccccagcccatgcctgcccacccccgacccgcccccagagccgagccccacgggctggggaccgccagacgggggtcgcgcggcgcttgtgcgcagggctccgcagcccccgggccgccccccgacgccggggccgcccctgtccgacgtctcccgagtgtcgcgccgcccagcctgggaggcgcggtggccggtgcggaccgggcactgcgggaggcacctctcggcctccgagcggcccctgtcgcccgcgcgctgtcactacagctcctttcctcgagccgaccgatccggccgccccttcctcccgctcttcccggagctggaggacctgccgctgctcggtaaggagcagctggcccggcgggaggccctgctgcacgcggcctgggcccggggctcgcgcccgcgtcacgcttccctgcccagctccgtggccgaggccttcgctcggcccagctcgctgcccgctgggtgcaccggccccgcctgcgcccgccccgacggccactcggcctgcaggcgcttggcgcaggcgcagtcgatgtgcttgccgatctaccgggaggcctgccaggagggcgagcaggcaggggcccccgcctggcagcacagacagcacgtctgcctgcacgcccacgcccacctgccattttgctggggggctgtctgtcctcaccttccaccctgtgccagccacggctcctggctctccggggcctgggggcctctggggcacaggggcaggactctggggctgggcacaggctacagagacagtgggggactggacgagatcagcagggtagcccgtgggacgcaaggcttcccgggaccctgcacctggagacggatctccagtctggagtcagaagtgtgagttatcagccactcaggctccgagccagctggattctctgcctgccactgtcagggttaagcggcaggcaggattgggcttttctggcttctaccatgaaatcctggccatgggaccccagtgacagatgatgtcttccatggtcatcagtgacctcagtagcctcaaatcatggtgagggctgggcttttgctgtcctcttctcacgcaaagttctgccaggaaggtgtgctgtgggggtcaaactcctgaggctctcccttccctggggctaccaattactggtcatggct

SEQ ID NO: 28892 - DNA, 2518 bp, Homo Sapiens
ccagcagtggctgcaccatgcacgtgaacggcaaagtggcgctggtgaccggcgcggctcagggcataggcagagcctttgcagaggcgctgctgcttaagggcgccaaggtagcgctggtggattggaatcttgaagcaggtgtacagtgtaaagctgccctgcatgagcaatttgaacctcagaagactctgttcatccagtgcgatgtggctgaccagcaacaactgagagacacttttagaaaagttgtagaccactttggaagactggacattttggtcaataatgctggagtgaataatgagaaaaactgggaaaaaactctgcaaattaatttggtttctgttatcagtggaacctatcttggtttggattacatgagtaagcaaaatggaggtgaaggcggcatcattatcaatatgtcatctttagcaggactcatgcccgttgcacagcagccggtttattgtgcttcaaagcatggcatagttggattcacacgctcagcagcgttggctgctaatcttatgaacagtggtgtgagactgaatgccatttgtccaggctttgttaacacagccatccttgaatcaattgaaaaagaagaaaacatgggacaatatatagaatataaggatcatatcaaggatatgattaaatactatggaattttggacccaccattgattgccaatggattgataacactcattgaagatgatgctttaaatggtgctattatgaagatcacaacttctaagggaattcattttcaagactatgatacaactccatttcaagcaaaaacccaatgaacagcttatgtgttagccatagctgaaaataagcacaaatagcttatattcagatcctatcttcatttgaatatagcttttaaatgaaatgttacagtttgaagttttccttcatgcacttggtgataaacgttttctaaatttttagttaagtatatggataaaaagttatgaactattaaaaatgtgatgtggaccaaaggctaggttgtaatcttgatagtctaaaaaatgatcaaaacaaatgattttcaaggaatattcaatattctgcctttcagaaagtgtatttatatctgtgcttcataaatattaatgttcttcagaacatcattttaaaggagatacttgaattgttatttaaatcaaaccagatgtaaaacactcacatacaagttcatactttaaaagaggaaagctacttaacaatgacaaatatttcacaataataatttttacttatataccatctttcaactgaacatttcagttcttccaagagcttcttagagtagtatattttgggggcagtcaaggaataaactacagtgtaaacatatcccagatgaaaactgctgtatggaaaaatgacagaaagtaactgattgacactgttgattcacagttcagcctcctatctgggaaagacatttctttcctctgctcactttaagaacttttaccgactccaaaaatctcaggaattaaacttttaacagttacagcaataaagaatagttagtactccaaaaatattatatttaagatgctcaacaagaaaaaaatgcaaatgtaatatttttttcaaattacttctttattgacttgtccaaatttcaaaagtgcctacccttcaataaaacttttttattctgatctccataaattacttagtcttctatgtatagctatcaaggaaataaaaccaattttgccacagccacaactgtaaatgtttttgtacccatgctgaaactcataacaacacagacataaaaatagctgtgaggttttgctttttttgttgtcagctatcttaagaatcattaaatacacctgctttgggtaaaactctttgcaagcagtaattaacactagtaacagtgaaagcacaagatttccaaatcagtcgttttctcaaaaaaatatcgtataagtgactcatcctgtctgctaactccagacctcccagcttgaagccaaatctttccatgtgagattgatatggatttcctagaagtactggaatgttgtcatatcttgccctattttaattctgctatagaaaacaattgccttcacttttaaggagtaatttgaatattaataactctggtctagattttcatataatgtattaaagacaaagtagtgaacatcaatgaacatctgatagagataaactgtaatcaggcataagcttgtttgtatgttctggcagtgactaatcagtaaatgatgtcggtttgcccagtatcacttatcttctgtatttttcctctgtcgtgtaaatagtataaccttttcatttatggacaattttttggactagtagccttcaatatacattctgctttgaattaattttttcaaatcaataaattatgtagacatttaaaatcaaatatcaagtagaattgaaaaatgtgagttacataagttaaaaacttactttaaatcttaccttctataggtagctc

SEQ ID NO: 28893 - DNA, 117143 bp, Homo Sapiens
acggggtctcgaaaaaaggagaatgggatgagaaggatatatgggtagtgtcattttttaacttgcagatttcatcctagtcttccagttatcgtttcctagcactccatgttcccaagatagtgtcaccaccccaaggactctctctcattttctttgcctgggccctctttctactgaggagtcgtggccttccatcagtagaagccggatgttcttgtgtccgaaattggtgggttcttggtctcactgacttcaagaatgaagttgcggaccctcacggtgagtggtacagttcttaaagatgatgtgtccagagtttgttccttctgatgttcggacgtgttcagagttacctccttctggtggattcgtggtctcgctggcttcaggagtgaagctgcagacctttgcggtgagtgttacagctcttaaggcggcatgtctggagtttgttcgttcctcccgtctggagttgttcattcctcctggtgggttcgtggtctcgctggcttcaggagtgaagctgcagacctctgcggtcggtgttaccagcagataaatgctatgcggacccaaagagtgagcagcagcaagatttattgcaaagagcacaagaacaaagcttccacagcgtggaaggagaccagagcgggttgctgctgctggctcaggcagcctgcatttttttttttttttttttttttttttgagatggagtctccctctgtcacccaggctggaatgcagtggtgcaatctgggctcactgcaagctccgcctcccgggttcacgccattctcctgcctcaacctccccagtagaggggattacaggcacccaccaccgcacccagctaatattttgtctttttagtagagtcggggtttcactgtgttagccaggatggtctcgatctcttgacctcgtgatccacccctctaggcctcccaaattgctgggattacaggtgtgagccactggcacccagcggggcagcctgcttttattcccttatctgaccccacccacatcctgttgattggtccattttacagagagctaattggtccgttttgacagggtgctgattggtgcatttacaatccctgagctagatatacacagagtgctgattggtgcatttacaatcctctagctagacataaaaattctccaagtccccactacatttgctagacacagagcactgattggtgcgtttacaaacctttagctagacacagagtgctgattggtgcatttgcaaaccttgagctagacacagagcactgattggtgcatttacaatcctttagctagacacagaagttctccaagtgcccaccagattagctagatacagagtgctgattggtgcatccccaaaccccaagctagacacagagtgctgactggtgcatataaaatcctcaggctagacataaaagttttccaagtccccatctgactcaggagcccagctggcttcacctagtggatcctgcgcagggctgtgccgggcgcctgcactcctctcagcccttgggcagtcgatgggaccgggcgctgaggagcagggggcggtgcccgtcggggaggctcaggccacgctggagctcacaggggttgggagggggctcgggcatggcgggctgcaggtcctgagccttgccctgtgcagggcggctggggcccggtgagaattcaagcggggtgcaggcgggccggcagtgctgggggacccggcgcaccctctgcagctgctggcccgggtgctaggcccctgactgcccggggccgggggtgcggggcccgctgagcccgcgcccacctggaactcgcgctggctggcgagcgctgcgcgcagccccagttcccacacccgcctctccctccacacttccccgcaagcagagggagccggctctggcttcggccagcccagagaggggcccccacagcgcagtggcgggctgaagggctcctccagcacggccagaatggacgccaaggccgaggaggcgccgagagcgagcgagggctgctagcacgttgtcacctcgcattctgaaccacagactctccaactctccggcgcttttcgcccactcggtccctcagaacacgaagggctctctcatcctgtcactaaaacgattagctgtccggagacacggaaaaagtcgcccctcttctttgcaggattcctcccttgaacttctccaaaccctcttagtgtgacgtgaccccacccctagctaacccaggctgcttccttaccagcttcccgccccctggggaggcggcaatgcaaagaccgtccgctgccagctctgccgctatctctgtggggtgaatctaacatggcggacaaagacagtaactagtcccgtttctccgcgttttcgccaagaagattggctcttaccacttgtccctcaaaacgaccaccccattgactggtggcgattgcgtcgacggagacggggcaaaagcaagctgaacccgaaaaataacaaacactggggctgaggggtggaactacgagtgcgcagacatgggccagagcgcatttcccctgccccaggcaaattcggcgctcactgcgtccccgcaggccactgaccttacaagactacttgccccagactcctggggctggatgggaattgtagtctccctaaagagttgtacgtatctttttaaggcctagtttctgctttcaaaatacgaaaacataacactccagtccataactgttgacaagtacaagcgcgcacaggtctccaatctatccactggatttccgtgagaattgtgcccgctctggtattggatgttcctctccataagactacagtttctaaggaacactgtggcgaagacctttcattccgcaacgcatgctggaaataattatttccctccacccccccaacaatccttattacttatatttaccgaaactggagacctccattagggcggaaagagtgggggattgggacctcttcttacgactgctttggacaataggtagcgattctgaccttcgtacagcaattactgtgatgcaataagccgcaactggaagagtagaggctagagggcaggcactttatggcaaactcaggtagaattcttcctcttccgtctctttccttttacgtcatccgggggcagactgggtggccaatccagagccccgagagacgcttggctctttctgtccctcccatcctctgattgtaccttgatttcgtattctgagaggctgctgcttagcggtagccccttggtttccgtggcaacggaaaagcgcgggaattacagataaattaaaactgcgactgcgcggcgtgagctcgctgagacttcctggacgggggacaggctgtggggtttctcagataactgggcccctgcgctcaggaggccttcaccctctgctctgggtaaaggtagtagagtcccgggaaagggacagggggcccaagtgatgctctggggtactggcgtgggagagtggatttccgaagctgacagatgggtattctttgacggggggtaggggcggaacctgagaggcgtaaggcgttgtgaaccctggggaggggggcagtttgtaggtcgcgagggaagcgctgaggatcaggaagggggcactgagtgtccgtgggggaatcctcgtgataggaactggaatatgccttgagggggacactatgtctttaaaaacgtcggctggtcatgaggtcaggagttccagaccagcctgaccaacgtggtgaaactccgtctctactaaaaatacaaaaattagccgggcgtggtgccgctccagctactcaggaggctgaggcaggagaatcgctagaacccgggaggcggaggttgcagtgagccgagatcgcgccattgcactccagcctgggcgacagagcgagactgtctcaaaacaaaacaaaacaaaacaaaacaaaaaacaccggctggtatgtatgagaggatgggaccttgtggaagaagaggtgccaggaatatgtctgggaaggggaggagacaggattttgtgggagggagaacttaagaactggatccatttgcgccattgagaaagcgcaagagggaagtagaggagcgtcagtagtaacagatgctgccggcagggatgtgcttgaggaggatccagagatgagagcaggtcactgggaaaggttaggggcggggaggccttgattggtgttggtttggtcgttgttgattttggttttatgcaagaaaaagaaaacaaccagaaacattggagaaagctaaggctaccaccacctacccggtcagtcactcctctgtagctttctctttcttggagaaaggaaaagacccaaggggttggcagcaatatgtgaaaaaattcagaatttatgttgtctaattacaaaaagcaacttctagaatctttaaaaataaaggacgttgtcattagttctttggtttgtattattctaaaaccttccaaatcttaaatttactttattttaaaatgataaaatgaagttgtcattttataaaccttttaaaaagatatatatatatgtttttctaatgtgttaaagttcattggaacagaaagaaatggatttatctgctcttcgcgttgaagaagtacaaaatgtcattaatgctatgcagaaaatcttagagtgtcccatctggtaagtcagcacaagagtgtattaatttgggattcctatgattatctcctatgcaaatgaacagaattgaccttacatactagggaagaaaagacatgtctagtaagattaggctattgtaattgctgatttccttaactgaagaactttaaaaatatagaaaatgattccttgttctccatccactctgcctctcccactcctctccttttcaacacaaatcctgtggtccgggaaagacagggactctgtcttgattggttctgcactggggcaggaatctagtttagattaactggcattttggcttttcttccagctctaaaacaagctccatcacttgaaatggcaaaataaaatcatggatgaggccgagggcggtggcttatgcctgtaatcccagcactttgggaggccaaggtggtaggatcacgaggtcaggagatcgagaccatcctggccaacatggtgaaaccccctctccactaaaaatacaaaaattagctgggcgtagtggcatgtgcctgtaatcccagctactcaggaggctgaggcaggagaatcacttgaaccaggaggcagatgttgctgtgagccaatatggcaccactgaactccagcgacagagctaaactccatcccaaaaaaaaaaaaaaaaaaaaaaaaacatggatgatcggtgtcgttgagaggataggtatttggaagaacctttgtttgaaactggctctgtacatacaatgaaattacatacttatttacatacaatgaaatgcagaggttttttttttatataggatctctgtcgagaggctggagtgcagtggtgctatcacagctcactgcagcctcaacctcgtcaggctcaagcaatcctcccacctcagcctccagagtagcagggacgataggtgtgcaccaccatgcccagctaatttttgtatttttttttctttttttgagatggagtcttgctctgttgcccaggctggagtgcagtggcgcgatctcagctcactgcaaactctgcctcccgggttcatgccattcttctgcctgagcctcctgaatagctgggactacaagcacccactaccacgcccggctaattttttgtatttttttttcttttttagtagaggcgggatttcaccgtgttagccaggatagtcttgatctcctgaccttgtgatccacccgcctgggcctcccaaagtgctaggattacaggcataagccactgcgtccagccattcttgtatttttctgttgtagagatagggttttgctatgttggccatgctggtctcaaactcctgacctcaagtgatctaccctcccttggcctctcaaggtgctgggattacaggcctgagccattgcacccagccatggtctaaaaatcttgattgaaataccaccttttcatttccagacacccctatttaaaattaccacacccccagcacacactttatcttctattcctgctgcttctccataacactgattactagctgacattctatgtaatgtatccattttttatctctagtcccacagaatgtaaactccaggatgggatttttgttttgtttacatacatctgtatgttcagtagttagaacggtacttgggacctagttgccactcaataaacatttgtcaaataaataataaactaaactaaattagttctttaatttttttaaatatggtgatggttagtagtgagtaacattcaaaaaataagttgaaaagttgtaccattgcctcttacccacaataaaaaagggtaaattcttttctgctttatgaaagttgtttttcatatttgaagtcaagttaatcagattaaggaaaatgtatgttgtgttttcagagcgatacaagatttataaataaccatcctctcccttgcccttcaacattatagctaaacaaaaataagaggaaaacaggattcacaatttatcaatttattgaaaatcagagccagagaagcaggaaatgacattgtaggaaaaaactgcttttgaaaaagcacaaaacttactcatgacaatcagtgatcaggaaaatcctcaatagtgtggcatttggatacatttatgtttcatttccatgggagagagtcataaaaataggatgttctttctcattctggcaaattaaaccatcaattaaaaactcagatacataaaaattaaagatgtaagaatgaaaatgctaaattgttattttcaatcaactattatgttttctagcttttcattgcttttttctgtttcctgttaagattaatttctttttttttttttttttttttttttgagacagactttggctcttgttgcccaggctggagtgcagtggcacaatctcggctcactacaacctccacctcccgggttcaagcaattctgctgcctcagcctccggagtacctgggattgcaggcatgtgccatcacaccagctaattttgtatttttagtagagacagggtttctccatattggtcaggttggtctcgaactcctgacctcaggtgatcctcctgccttggcctccgaaagtgctgggattacaggcgtgagccaccgctcccagactttttgttttgttttgttttgtttttttgagacacggtctcgctctgctgcctaggctggagtgcagtggcacgatcttggctcactgccagctccgactcccgggttcaggccattctcctgcctcagcctcccgagtagctgggactacaggcgcccaccactatgcccggctaattttttgtatttttagtagagacggggtttcaccatgttagccaagatggtctcgatctcctgaccttgtgatccacccgcctcagccttccaaagtgctgggattacagtcctgagccactgcgcccggcctggacctttttttttcggggtggggggttggagtctggctctgtcgcccaggctggagtgcagtggcgccatcttggctcactgcaacctccgcctgccaggttcaagttcaagcgcttctcctgcctcagcctcctgagtagctgggattataggcgcacgccaccgtggccggctaattttgtatttttagtagagatagggtttcatcacgttggtcaggctggtcttgaagtcctgatctcgtgatccacccgcctcggccttccaaagtgctggcgtgagccactgcgcctggcttaagattaatttttgtttgttttgtttttgagacggagtctcgctctttcacccaggccggagtgcagtggcgccatctcggctcactgcaagctccgcctcccgggttcacgccattctcctgcctcggccccccaagtagctgggactacaggcgtccaccaccacgcccggctaattttttgtatttttagtagagacggggtttcaccgtgttagccaggatggtctccacttcctgacctcgtgatccgcccacctcggcctcccaaagtgctgggattacaggcgtgagccaccgcgcccggccttaagattaatttttatggtgttttacattcatttgtatggaaagttctaggatagggatcatatttcacttccttttaatatagtacagtatagcacaatttgcagttatgtcttaatatgtgatcaggaatgatcatgactggaaacagtgttatttgtggtagctatagggtaggtaaggttttcagcctgttttaggtttcttgaactaaaattccttctgctgtcttctaagtcaatattggcagctatttctgacaattggtagttctttgtaactttttacctatgactataacatttttgactttcagaagaatttgctaaaatgtgttccccggtgggttgttgtttttcaacctaaacctagctgctttttccagtcacttatccgtattggaagctcaaaatgcaaatatacagtaggcctaaaatattgcctggtttgaaaagtgtttaaaatatttgaatcatttttatagtaaacatttactctcatcaggacctagaaggggaacattttaattttttttcttttcccttttcacagtcttccttcaacattcattacctttttacatatcggagttttcatctgttcaaagtttgtgtttacagtgtgtttatatagtttagattataattaccatactgaaatataattgtttcagaattgagtcagtggtgagaatgaaagccatctggtatgataactgaatccaatttttcttttacggagaatttctttgaaatgtagcttatctcagaaatagggatttagtaaccaatcagagttttctttgtcaaggttgtttttctttttaaagtcacatttggtcccagtaataataccaatgttggtacaagttatctcaggttgtgaagcatttttcccaagtcatctcaggttgtgaagcattttcccaagtagcatttaattttattcttgcaatagcccaaggagtctggcagggtgaatggcaagagaaggaaacaggttcaggtagagtggttagcccaaggtggctctgcttatatacacaactggtagtagaaacccagcctcctgacttagttcattgtttttcttttcactgccctgtgctatgtcaaaaaccccatgattacaagagttgtattacaacccttcacaataaggttactgtccacaagcttttcttgtgatccttttcttttttttttttctttttttgagatggattctctgtcacccaggctggcccgccttggcctcccaaaatgctgggattacagcgtgagccaccgcacctggcccttgtgatccttttctaaaaagttaaatatttaaggaaaaaaccacattcttgtcacactgccaggttagtcgttctttgatatcttgcctggactttatccaaaaaatccgtttcaaaaattcacatttagagctaagtgtagtggctcacgcctgtaatcccggtcgaggcagatggatcacttgaggtcaggacttcaagaccagcctgggcaatatggtgaaaccccttccctaccaaaaatacaaaaaaattagccgggtgtggcagcacgcgcctgtagtcccagctacttggaatgctgaggcacaagaatcacttcaatccgagaggcagaggttgcagtgagccaagaccacaccactgcactccagcctgagcagcagagtgagtgagactccatctccaaaaaaaaaaaaaaaggttcacattcagaagaaagctaaaggccgggtatagtagctcacacctgtaatcccagcactttgggaagccgaagcaggaagattgcttgatgccaggcattcaagaccagcatgggcatcatagtgagatcctgtctctacaaaaattaattaacattaaaaattaaaaagatggctggcatggtggctcactcctgtaatcccagtactttgggaggccaaggcatggtggtgcatgcctttagtcccagctactcgggaggctgaggcaggagaatcacttgaattcaggaggcggaggttacagagagccgagatggtgccactgcactccagcctgggcgacagaacgagactctgtctgaaaaaaaaaaagaaaattaaaaagaccagaataaagctaaagatttaaaatagcctataggttcctaccagaagttaccagctacctctctgatagtctttccctacaatatcctcctggattattacattttagcaccttgacctatctgatgtcctgcatacacaggcatggtcctgctcagggtttgccttctctgctccctctttcttggaatgctcttcccctaattgttgcatagtgtgtttctttacattattaagctatcctctagtctcacctcagtgaaacctttcctgactccccccatgtacatctcacccccacatagatattgaactacctgtttccccttaccctgcttaatttttctctttaatgcacttattcccatgtattctttaattccgtatcaactgtctaccacactagaatatgagctctatgagagcaggctttattttgtaaactgctacatttctatctcctagaatagtacttgaatatagtagtagatacttaataaacacttgttatattagtataataaatgaactaatctcaggaatgccttggttttgtggatagacaggtagggatgggaacttgggtgatgtattttctgaagtttttatttttaagcttattattattttgagatggagtccagctctgtcgcccaggttggagtacagtggcgcgatcttggctcactgcaacgtgcacttccccggttcaagcgattctcctgccttagcctcccaagtagctgggattacaggcgcatgccaccatgcccagttagttttggtatttttagtagagacagcgtttcactgtgttggccaggctggtctcgaaatcctgacctcatgatccgcccgcctcggcctcccaagtgctgggattacaagcatgagcccccgtgtctggccttattttcttttttttgagacagagtcttcctctgtcacctaggctggagtgcagtggcacgatattggctcactctgcaacctccacctccaggattcaagtgatccttctaccttagtctccaaagtagctgagaccacaggcatgccccaccacgcccggctaatttccgtattttaagcgtagacagggtttcaccatattgtccaggatgatctggaactcctgagctcaggtgatccacccacctcagcctcccaaagtgctaggattacaggcatgaggcaccatgcccggccttaagcttatcattttctaaatttcctttagtgagtacttattacactgtttttacaaagtaatcacaaaccaaacatcatgcctcttctgaagtgatctaataagagtacacagtaccatctgtaaagtgttcttgccagaaagttgaacctgaatgattaagcctgtaagtctagtttataggaaataaggctagaggaacaagttaaacctcaccatagggttatacaatcagcaaaatccagaatgggggaaactccacaggtcaaatgacctaattttaaaaataaatgacaagggagaaaaagtaagagacacctatagatcagaagacacttggggctgggcatggtggctcacacctgtaatcccagcactttgggaggccaaggcaggcggatcacctgaggtcaggagttcaagaccagccggccaacatggtgaaccccaactctactaaaattacgaaaaatcagccgggcgtggtggcgcacgcgtgtagttccaactacctgggaggctgaggcaggagaatcacttgaacttgggaggcagaggttgcagtgagccgagatcgcaccattgcatgccagtctgggctacaaaagcaaaaccccatctcaaaaaaaagaagacacttgggtttgggtgtgttggctcatgcctgtaaaccccgtgctgggaggattgcttgagcccaggagttcaaggctgcagtgaggtatgtttgcaccactgcactccagcctaggtgacagagtgtgaccttatcttaaaagtaataataattaaaataatctggggtaggggtggatatgggtgaaacagcttggccatgagttgatggttgttggaccagggtgatggtccatatagttcattttattattttatttacttgaaattttgaaatacttgaaattttccatattaagttaaaaaggcatttacagtaaacaaaaaaaagttctaggaaggaattcaaaagaaatataagcagaaaattttgtctttatggagcttaaagatgagatgtgcacccacagtgatagtgcagaaaaatatatcactggaaatgaattcgtacgaactattatcaactaatcttttaaatgctgatgatagtatagagtattgaagggatcaatataattctgttttgatatctgaaagctcactgaaggtaaggatcgtattctctgctgtattctcagttcctgacacagcagacatttaataaatattgaacgaacttgaggccttatgttgactcagtcataacagctcaaagttgaacttattcactaagaatagctttatttttaaataaattattgagcctcatttattttctttttctccccccctaccctgctagtctggagttgatcaaggaacctgtctccacaaagtgtgaccacatattttgcaagtaagtttgaatgtgttatgtggctccattattagcttttgtttttgtccttcataacccaggaaacacctaactttatagaagctttactttcttcaattaagtgagaacgaaaaatccaactccatttcattctttctcagagagtatatagttatcaaaagttggttgtaatcatagttcctggtaaagttttgacatatattatctttttttttttttttgagacaaagtctcgctctgtcgcccaggctggagtgcagtggcatgatcttggctcactgcaacctccgccccccgagttcaagcgattcttctacctcagcctcccaggtagctgggactacaggcacccgccaccatgcttggctaatttttgtacttttagtagagataaggtttcaccatattggccaggctggtctcgaactcctgaccttgtgatccacctgcctcggcctcccaaagttctgggattacaggcgtgagccaccacacccgactgacatatattatctattaggatgtaacatcattttgaacagtgttttgtattttttgtgtccatcagtgaaagcaaactgcaagcagttttgaaataagcacattgtgtttgagccttcccagtttctcctttctgttcatttctgcatatccttatgcattcccccttctaagggtcagtgtttgcccgctttgtaatcattgtgaagacaggaaaggacctgataccagtttctatttaggccaaaattcatttatagcagtgattcaagttatatttacgtatttgatgatcttgtcttttgaaatgaaaatgtttgtttcttaataaaagaatttcagaaaaagtagagtaggtaatttagtagaacaagtgggctttctccttttctttatgttaagctatggctcacatcttaccttaaatgtcaactaatttgtttttaagtatttatgtacctggtacataacctggtaccaggtacaaactatgtacttggtaaaaagtttattagcacaaaaaggtatatgatgcaaagtatacttccctcttaccctacaacccctgcctccctgttccctccccagacaaccacaatgatcaatttcttatgtatcctttgaggaatttttaaattccagagttcttaacttggggtttatgaatagtctttatgaatttcctagaattatatttaaattgtattcaaaactatggccatgtacatttttctgggaagatagtccataattttcatctgagtgagctaagatcatgccactgcactccagcctgggagacaagagggagactcaaaaaaaaaaaagaaaggcccagtatttactacagagagctaaagattaacctttaaagccctggggctttcaatttatctggatgagaatctttctggaatgaactgtatgttttatggtcagcttgagtaacaaatgctgagcatactatactattattacagggactcaggggcccagtgtggtagctcctgcccataaccccagcactttgggaggccaaggcaggaggatcacttaaggccaggagttcgaagctgtagtgagctatgatcacaccactgcactccagcctagatgacagagtgagaccctgtctttttttttttttgagatggtgtttcactctattgcccaggctggagtgcagtggtgtgatctcggctcactgcaacctccacctcctgggttcaagcgattctcctgcctcagcctcttgagtagctgggattacaggcatctgccaccacacccagctaatttttgtatttttagtcgagacagggttttcaccatgttggccaggctgctctcaaactcctgacttcagctaccttggccttaaaaagtgttgggattacaggtgtaagccaccgcgcctggctgaccctgtctcttaacaaaaaaagagagattaagttatgaatatagttgctttgagaacttgtggaagaaggaaattataggcttataggcagagataataatacgagcaaatgtacaaataaaagaaaatagaggacgggcgcggtggctcacgcctataataccagcactttgggaggtcgaggtgggcggatcacgaggtcaggaaattaagaccatcctggccaaaatggcgaaacactgtctctactaaaacacacaaaaaactagcctggcatggtggcacgtacctgtagtcccagctacttggtaggctgcggcaggggtatcacttgaacctgggaggcagaggttgccctgagccgagatcatgccaatgcactccagcctgacaacagagtgagactctgtctgaaaaaaaagaaaagaaaagaaaatacatccaggaaaaataagctaactttgcatatgtgtataggagttgtgttagaaaaggaagaagccctcaaagatgggaagccatttgcaagaaagagaaggtccaagaggaggcagaagggattggaaatagaaaaaggatgtaagaaagagttgattattactcataaacagtaatgaaggaaaaggagagtaattctacaggaagatgctgaggtgctttgagcccagtgaagttggaggtaaagacagctgttgaggccgggcacggtggctcacgcctctaatcctagcacttttggagcccaaggcaggtggatcacctgaggtcaggagctcaagaccagcctgaccaacatagagaaaccccatctctactaaaaatacaaaattagacgggcgtggaggcgcatgcctgtaatcccagctacttgggaggctgaggcaggagaatcacttgaacctgggaggcggaggttgcagtgagccgagattgcgccattgcactccagcctggccgacaagagtgaaaactgtctcaaaaaaaaaaaacaacaaaaaacagctgttgagattgagaggattagagttggcaactggagaagagtgagaagcttggtttcaagcttgtgatagtcaggattgtgatagtcaggaaagaaccagtcataaagatatatgtgtgtgtatacatataaatatgttatatatatgtgtgtgtgtgacacatatatatttttgtttgtttctttgagacagtgtctccctctgacacccaggctggagttcagtggtgtgatcatagttcacttttaccttgcaatctgggttcaagcaatctctcatctcagcccctcaagtagctaggactacaggtacatggcatttgcccagctaatttttaagtttcttgtagagatgggccagccatattttaaattgtgttttgaatgttatattagaattaaaagtccaaagccgggtgtggtggctcacgcctgtaatcccagcactttgggaggctgaggtgggcggatcacgaggtcaggagttcgagaccagcctggccaatatggtaacaccatctctactaaaaatacaaaaattagctgggtatgggggcacatgcctgtagtcccagctactcaggaggctgaggcagaggaacctcttgaacccaggaggcagaggctgcagtgagttgagatcgtgccactgtactctagcctgggcgacagagcaagattccgtctcaaaaaaaaaaaaagtccagtataatgcccatgtgatagatcgactttttcatgaaatctcttctgtaatatcaatataatctgaataacactttgatctatatgatgagaaagctgggagcctgggagcgatacccccatgcttttgttgtattaattgtattttctacggataaactctaattgctaaaaataaaacaactttattgacccaagcaagcctaaagttctgaaatcttttttttatttttgtttgtttgtttgtttgtttttgtttgttttgttttgagacggagtctcgctctgtcgcccaggctggagtgcggtggtgcagtctcggctcactgcaagctccacctcccgggttcacaccattctcctgcctcagcctcccaagtagctgggactacagacgcctgccaccacgcccagctaatttttttgtatttttagtagagaaagggtttcaccgtgttagccaggatggtctcgatctcctgacctcgtgatctgcccgccttggcctccctaagttctgggattacaagtgtgagccaccacgcccggctgtttttttttgttttgttttgagacggagtctcactgtgttgcccagactggagtgcagtggcatgatctcagctcactgccacctccatctcctgggttcaagcaaatctcctgcctcagcctcccgagtagctgggactacaggcatgtgccaccacacctggctaatttttgtatttttagtagagacggggtttcactatgttggccaggctggtccaaaactcctgacctcaggtgatctgctcgccttggcctcccacagtgccaggattacaggcatgagccaccttgcccagccagttctgaaatcttttatgaagcctataaaaaaagataataataccaatctagaaaatatttcttaaggcagtcatgcattagtttgaactttccaaacaaaaaaatgcaatgtgtaatacttttttttttttttttgagatggagtcttgttctgttgcccaggctggagtgcagtggtacaatctcggctcactgcagcctctgcctctctggttcaagtgattctcctgcctcagcctcccaagtagctgggattacaggcgtgcaccaccatgcatggctaatttttgtatttttagtagagacagggtttcaccatgttgacaaggctgatctcgaactcctgacctcaggtgatccgcccacctcagcctcccaaagtgctgagattacaggcattagccaccacgcccagccttttattttagtagagaccatgtttcaccatgttgaccaagctggtcttgagctgacctcaagtgatccgcccacctccacctcccaaaatggtgggattataggcatgagccaccgcacccagcctgtaatacttttttgaagatctagaaccacattgttcaaagagatagaatgtgagcaataaatgtaacttaaatttttcaacagctactttttttttttttttttgagacagggtcttactctgttgtcccagctggagtacagtggtgcgatcatgaggcttactgttgccttgacctcctaggctcaagcgatcctatcacctcagtctcccaagtagctgggactgtaagtgcacaccaccatatccagctaaattttgtgttttctgtagagacggggtttcgccatgtttcccaggctggtcttgaactttgggcttaacccgtctgcccacctaggcatcccaaagtgctaggattacaggtgtgagtcatcatgcctggccagtattttagttagctctgtcttttcaagtcatatacaagttcattttcttttaagtttagttaacaacctttatacatgtattctttttctagcataaagaaagattcgaggccgggtgcggtggctcacgcctgtaatcccagcactttgggaggctgagatgggcacatcacgaggtcaggagatcgagaccatcctggctaacatggtgaaaccccgcctctactaaaattacaaaaagttagccaggcgtggtagcgggcacctgtagtcccagctactcaggaggctgaggcaggagaatggcgtgaacccaggaggcagagcttgcagtgagcagagattgtgccactgcactccagcctgagagacagagcgagactccgtctaaaaaaaaaaaaaaagattcgaatccttatcttggttgatttttgcgtatctagttccactgaattatttatataattgtatagactacagcacgagacagcttagcttgtcactctactgtactatattctgcagtactatcataagggaatttcctccctacccctgctctgaattgttcaattgtactatttgctggagtaatgcttgatgccttcttgatccattatactagagtatatgtagtatttgtagattctgaaggagtgggagcctctattctgagttttaaaggtacttatgtacagtggaggtagctttttgacagcctcatcttccaaactatagagtcattgttttgttgagtgcaatatggtacttgaagcatctatatcggcgaagaaggacccaagtctccttgaccttacctacctacattcactttctctggtaggaagattgtgggtgcctctctccagacttagtttccatgtcaaaaaagaaaaaaggaagattgtgggctttgctacaatccaattctggatccaatataaccttcattgcttaattactgtgtgatctgggacaagcctctactctataaaaatgaagataaggccaggcttgatggctcatgcctgtaatcccagcacgttgggatgccaaggcaggaggatcacttgaggtcaggagttcgagaccagactgggcaatatagtgaaaccacatctgtacaaaaataaagatagaaagtagcccagcgcaatggctcacacctgtaatcccagcactttgggaggctgaagcaggcgatcacttgaggtcgggagttcaagactgtagacagatagataggtaggtagatagatagagatatagatatagttggggtttttttgttttgttttgttttgtttttgagatggagtttcgctcttgttgcccaggctggagtgcaatggcgcgatctcagtttactgcaacctccgcctcccgggttcaagagattctcctgcctcagcctcctgagtagccaggattacaggcatatgccaccatgcccggctaatttttgtatttttagtagagacagggtttctccgtgttggtcaggctggtcttgaactcctgacctctcccaaagtgttgggattacaggcgtgagccaccgctcctggccttttttttttttttttttttttttttgagacagagtcttcctctgttgcccagggtggagtgcagtggcactcttctcagctcattgcaacctctgccatcctgggttccagtgattctcatgcctcagcctcccaagtagctgggactcaggcgtgtgcccaccacgcctggctaattttgttgtatttttagtagagacagggtttcaccatgttagccaggctggtctcaaactccaggcctcaagtgatctgcctgcctcagcctcctgggattgcagacatgagccactgcacccggccaagagagggtaataaatgttaaattacctggctagtaaaaaatattctctaagtgtcttttctcacaattcccaatgccttttttttttttttggcacaatctcactctgttgcccaggctggaatgcaatggtgcaatattggctcactgtaacccccgcctcacaggttcaacttattctcatgcctcagcctcccgagtaactgggactacagtgcaccaccaccacacccagctaatttttgaatatttagtagagacagggtttcaccatgttggccaggctggtcttgaactcctggcctcaagtgattcacccaccccgcaagtgctgggattacaggtgtggaccaccgtgcacagccctagtgactttttttttagccccttaatcttttctttcctgggtctcttcattgtcagtgtctgctatttactccctacctagtcacccccttcaccagtatattatgtcctttatgttttattttgcaggatcttattttgcttttctattgaatcccctccatctagaatagtactagacatagtaaatattggttgtatgagtgaatcgctgcttttaattatcatcaccattgctctctctacttctggtctatgatccactttgagttaacttttgttatttggtgtgagataggagtataatttcattcttttacatgtggttatacttttgtctcaacactgtttgttaaaaacacaaaaagtattattttcccatttaatcatctttggcctgggcacggtggctcatgcctgtaatcccagcactctggaaggccaaggcagatggatcaatttgaggccaggagttcaagactagccaacatggtgaaactaaaaatacaaaaaattagctgggtatggtggtgcatgtctgtaatcccagctactcgggaggctgaggcacgagaattgcttgagcctaggaggtggaggttgtagtgagctgagattgtgtcactaccctccagcctgggtgatagagtgagtctgtctcaaaaaaaaaaaaaaaaaattaagaaaataaaaatcgtcggccaggcatggtggctcacacctgtaatcccagcactttgggaggcagaggcgggcagatcacgaggtcaggagatggagaccatcctggctaacatggtgaaaccccgtctctactaaaaataaaaaaattagccgggcatggtgctgggcgcctgtagtcccagctgctcgggaggctgaggcaggagaatggcgtgaacccaggaggtggagcttgcagtgagccgagatcgtgccactgcactccagcctgggagacagagcgagactccgtctcaaaaaaaaaaaaaaaaaaaattgtcttggtatttattattgttgaaaatcgcttgatcacagatgtatgtatgagtttatttctgtactgtcaattccattttattgatgtatgtgtctattcttatgctattaccacactttcttgattactatagctttgtggtgaggtgttgagattttaaactaattataagcatcttacatgaactacttaccgtttatatttgattatgcagcatgaaataattatgaatatatcattaaatatgccatattaacttttattaagttttatgtgatcataacagtaagccatatgcatgtaagttcagttttcatagatcattgcttatgtagtttaggtttttgcttatgcagcatccaaaaacaattaggaaactattgcttgtaattcacctgccattactttttaaatggctcttaagggcagttgtgagattatcttttcatggctatttgccttttgagtattctttctacaaaaggaagtaaattaaattgttctttctttctttataatttatagattttgcatgctgaaacttctcaaccagaagaaagggccttcacagtgtcctttatgtaagaatgatataaccaaaaggtatataatttggtaatgatgctaggttggaagcaaccacagtaggaaaaagtagaaattatttaataacatagcgttcctataaaaccattcatcagaaaaatttataaaagagtttttagcacacagtaaattatttccaaagttattttcctgaaagttttatgggacatctgccttatacaggtattagaaacttactgcctttctctaatgcttctagtgtaaaaacttgcagacttatgtaaagtagggctgtatcgccgtgcccccattgtctgttaatcttgtttttatatttttgattgtgtttccttttctttttttttttttttttaagacagggtcctgctctgtcactgaggctggagtgcagtggcgtgatctcggctcactgtagcctctgtctcccagcctcttcctgccttagcctcccaaatagctgggactacaggcacacgctaccatgcccggccaatttttgtattttttgtagagatgaggttttaccatgttgcccaggctggtaactcctgagctcaggtgatctgcccacctcggcctcccaaagtgctggggttcacaggtgtgtgtttatttctatctaattatttacacaaacacaatgtatttatatattgtgtatctcttctgctacaatgtaaattctatgagagtagtaattttgtctgtctcaacactgtttttcctaagtttggtacatagtaggcactcagatgcttaaaggaatgaatgaattgtgctttaattccactttactaaacccaaatctccctttggacattgttatctatgtgttttcaaagaagtataatcataatttgacagaaatccttgagaggcagaactaagtgagggattgggcagggttcagatgttaagaacagtaagctcagcagggtgtgattgctcatgcctataaccctagcactctaggaggctgaggtgggatgattgcttgaggccaggagtttgaaatcagcctgggcaacatagtgagaccccatcactaccaacaaaataaataaataaatgtacatggtggcatatgcccatagtcctagctacttgggaggctatagtgggaggatagcttgagtacagaagtctgaggctgcagtgagctatgattgtggcactgcatgctagcctgggcaatagagcaagaccctgtctctaaattaaacaaaaaaaaaagtactctagttttctatgcaatgcattatatctgctgtggatttagggcagtattatatcagataattttaggcatttggtaggcttaaatgaatgacaaaaagttactaaatcactgccatcacacggtttatacagatgtcaatgatgtattgattatagaggttttctactgttgctgcatcttatttttatttgtttacatgtcttttcttattttagtgtccttaaaaggttgataatcacttgctgagtgtgtttctcaaacaatttaatttcaggagcctacaagaaagtacgagatttagtcaacttgttgaagagctattgaaaatcatttgtgcttttcagcttgacacaggtttggagtgtaagtgttgaatatcccaagaatgcaactcaagtgctgtccatgaaaactcaggaagtttgcacaattactttctatgacgtggtgataagaccttttagtctaggttaattttagttctgtatctgtaatctatttttaaaaaattactcccactggtctcacaccttattttatcaatcgtaaggtgcacatttttcacatcttaacatctctgaaattgggaacattttactattgagggtgtgtcatttgtttaatttgtgtgctttctttcttagtgatacacgaaataatagtgccacttacattgttggtgtcttagctttagtgaaatacagtattgataggcaaatttcttagtgttaaggtagaaaacaaggactctaaataactttgatggtctgtgtatttgtttttgtttcctaggagtaaaatttccagttgattttttaaaatttgatttttaaaaaaaatcacaggtaaccttaatgcattgtcttaacacaacaaagagcatacatagggtttctcttggtttctttgattataattcatacatttttctctaactgcaaacataatgttttcccttgtattttacagatgcaaacagctataattttgcaaaaaaggaaaataactctcctgaacatctaaaagatgaagtttctatcatccaaagtatgggctacagaaaccgtgccaaaagacttctacagagtgaacccgaaaatccttccttggtaaaaccatttgttttcttcttcttcttcttcttcttttcttttttttttcttttttttttttgagatggagtcttgctctgtggcccaggctagaagcagtcctcctgccttagcccccttagtagctgggattacaggcacgcgccaccatgccaggctaatttttgtatttttagtagagacggggtttcatcatgttggccaggctggtctcgaactcctaacctcaggtgatccacccacctcggctccccaaattgctgggattacaggtgtgagccactgtgcccggccggtaaaaccattttcatttattctggcaacatctctttattgagcattgtgaatatgttagtgaatgtgctagatgctcatagatttatataaaaagttagtgaagaaggaaagatggtatattaagtggttagacaagtgttctaatcagttagagttcagagaaggtcagggtacctgatataatcaagagagagaccttacagccaggtgaggtgaatgtacctataatcccagctacttaggaggctgaaatgggaggatcacttgagtccaggtttgagaccagcccaggcaacatagcaagatccccatcagatacaccaaaaagacagatttcttttttttttttttttttgagacagagtctcgctctgtcgcccaggctggagcgcagtgacacgatgtcagctcactgcaacctccgcctcccaggttcaagtgattctcctgcctcagcctcctgagtagttgggactacaggggtacgacaccagacctggctaatttttgtaattttagtagagtcggggtttcaccatattggtcaggctggtctcgaactcctgacctcaggtgatccaccctccttggcctcccagagtgctgggattacaggcgtgagccaccaagcccggccaaaaaagagagctcttataggcccttccttgctttggagctttatctgctctgtgatgcttatctaaaatagccataaggtcactgatatttttaagcatttggaaattacttcagctgggtgccatggctcatgcctataatcccaaccctttgggaggctgaggtaggaggtcctttgagcccagcttgggcaacacagtgagacactgtctctgcaattaaaaaaaaaaaaaaagtagctgggtgccgtggctcacgcctgtaattccagcactaggaggcttgaggattgcctgagctcaggagttcaagaccagtttgggcaacatagcaagtccttgtctatattaaaagtttttttaaattatctgggcatggtggtgtgtgcctgtagtcccagctacttgggaagctgagacagaaggatcacttgagtccaggagatgtagactacagtgagctatgatcactccactgcacttcagcgtgggcggcaaagcaagatctagttgcaaaaaaaaaaagaactggctgggtgcggcggctaacacctgcaatcccagcaccttgggaggctgaggccagtggatcatgaggtcaggagattgagaccaccctggccaacatggtgaaacccggtctctactaaaaatacaaaaattagctgggtgtggtggcacgtgcctgtaatcccagctactccagaggctgaggatggagaatcacttgaacctgagagtcggaggttgcagtgagccgagattgcgccactgcactccagcctggcgacagagcgagactccgtctcaaaaaaaaaaaaaaaaaagcttcacgcctgtaatcccagcactttgggaggccgagtcaagtggatcacgaggtgtggagatcaagactatcctggctcacatggtgaaagcccgtctctactaaaaacacagaaaaattagctgagcgtgatggcggactcctgtagtcccagctactcgggaggctgaggcaggagaatagcatgaacccgggaggtggagcttgcagtgagccgagatcccgccactgcgatccagcctgggcgacagagtgagactctgtctcaaaaaaaaaacaaaaaaacttagctgggcgtggtggtatgcacctgtggtcctagctacttgggaggctgaggctggagcattgctttaacatagagagtcaaggctgcagttgagctatgactgtgccactggactccagcgcaggtgactgagaccctatcttttaaaaaaagggaaaattacttgaacttaaaaggtgtaattgttaaagaaaatgtagtgatttgctctgttgttacttatatgtgcatgaatgatggagatcttaaaaagtaatcattctggggctgggcgtagtagcttgcacctgtaatcccagcacttcgggaggctgaggcaggcagataatttgaggtcaggagtttgagaccagcctggccaacatggtgaaacccatctctactaaaaatacaaaaattagctgggtgtggtggcacgtacctgtaatcccagctactcgggaggcggaggcacaagaattgcttgaacctaggacgcggaggttgcagcgagccaagatcgcgccactgcactccagcctgggccgtagagtgagactctgtctcaaaaaagaaaaaaaagtaattgttctagctgggcgcagtggctcttgcctgtaatcccagcactttgggaggccaaggcgggtggatctcgagtcctagagttcaagaccagcctaggcaatgtggtgaaaccccatcgctacaaaaaatacaaaaattagccaggcatggtggcgtgcgcatgtagtcccagctccttgggaggctgaggtgggaggatcacttgaacccaggagacagaggttgcagtgaaccgagatcacgccaccacgctccagcctgggcaacagaacaagactctgtctaaaaaaatacaaataaaataaaagtagttctcacagtaccagcattcatttttcaaaagatatagagctaaaaaggaaggaaaaaaaaagtaatgttgggcttttaaatactcgttcctatactaaatgttcttaggagtgctggggttttattgtcatcatttatcctttttaaaaatgttattggccaggcacggtggctcatggctgtaatcccagcactttgggaggccgaggcaggcagatcacctgaggtcaggagtgtgagaccagcctggccaacatggcgaaacctgtctctactaaaaatacaaaaattaactaggcgtggtggtgtacgcctgtagtcccagctactcgggaggctgaggcaggagaatcaactgaaccagggaggtggaggttgcagtgtgccgagatcacgccactgcactctagcctggcaacagagcaagattctgtctcaaaaaaaaaaaacatatatacacatatatcccaaagtgctgggattacatatatatatatatatatatatcatatctatatatatatatatgtaatatatatgttatatatatattacatatatatatgttatatatatgttatatatatataatatatatatgttatatatatgttatatatatatatacacacacacacacatatatatgtatatatatatacacacacacacacatattagccaggcatagttgcacacgcttgtagacccagctactcaggaggctgaggcaggagaatctcttgaacttaggaggcggaggttgcagtgagctgagattgcgccactgcactccagcctgggtgacagagcaggactctgtacaccccccaaaacaaaaaaaaaagttatcagatgtgattggaatgtatatcaagtatcagcttcaaaatatgctatattaatacttcaaaaattacacaaataatacataatcaggtttgaaaaatttaagacaacagaaaaaaaaattcaaatcacacatatcccacacattttattattactactactattattttgtagagactgggtctcactctgttgcttatgctggtcttgaactcctggcctcaagcagtcctgctccagcctcccaaagtgctgggattataggcatgagctaccgctcccagccccagacattttagtgtgtaaattcctgggcattttttccaggcatcatacatgttagctgactgatgatggtcaatttattttgtccatggtgtcaagtttctcttcaggaggaaaagcacagaactggccaataattgcttgactgttctttaccatactgtttagcaggaaaccagtctcagtgtccaactctctaaccttggaactgtgagaactctgaggacaaagcagcggatacaacctcaaaagacgtctgtctacattgaattgggtaagggtctcaggttttttaagtatttaataataattgctggattccttatcttatagttttgccaaaaatcttggtcataatttgtatttgtggtaggcagctttgggaagtgaattttatgagccctatggtgagttataaaaaatgtaaaagacgcagttcccaccttgaagaatcttactttaaaaagggagcaaaagaggccaggcatggtggctcacacctgtaatcccagcactttgggaggccaaagtgggtggatcacctgaggtcgggagttcgagaccagcctagccaacatggagaaactctgtctgtaccaaaaaataaaaaattagccaggtgtggtggcacataactgtaatcccagctactcgggaggctgaggcaggagaatcacttgaacccgggaggtggaggttgcggtgaaccgagatcgcaccattgcactccagcctgggcaaaaatagcgaaactccatctaaaaaaaaaaaagagagcaaaagaaagaatatctggttttaaatatgtgtaaatatgttttggaaagatggagagtagcaataaggaaaaacatgatggattgctacagtatttagttccaagataaattgtactagatgaggaagccttttaagaagagctgaattgccaggcgcagtgctcacgcctgtaatcccagcactttggaaggccgaggtgggcggatcacctgaggtcgggagttcaagaccagcctgaccaacatggagaaaccccatctctactaaaaaaaaaaaaaaaaaaattagccggggtggtggcttatgcctgaaatcccagctactcaggaggctgaggcaggagaatcgcttgaacccaggaagcagaggttgcagtgagccaagatcgcaccattgcactccagcctaggcaacaagagtgaaactccatctcaaaaaaaaaaaaaaagagctgaatcttggctgggcaggatggctcgtgcctgtaatcctaacgctttggaagaccgaggcagaaggattggttgagtccacgagtttaagaccagcctggccaacataggggaaccctgtctctatttttaaaataataatacatttttggccggtgcggtggctcatgcctgtaatcccaatactttgggaggctgaggcaggtagatcacctgaggtcagagttcgagaccagcctggataacctggtgaaacccctctttactaaaaatacaaaaaaaaaaaaaaattagctgggtgtggtagcacatgcttgtaatcccagctacttgggaggctgaggcaggagaatcgcttgaaccagggaggcggaggttacaatgagccaacactacaccactgcactccagcctgggcaatagagtgagactgcatctcaaaaaaataataatttttaaaaataataaatttttttaagcttataaaaagaaaagttgaggccagcatagtagctcacatctgtaatctcagcagtggcagaggattgcttgaagccaggagtttgagaccagcctgggcaacatagcaagacctcatctctacaaaaaaatttcttttttaaattagctgggtgtggtggtgtgcatctgtagtcccagctactcaggaggcagaggtgagtggatacattgaacccaggagtttgaggctgtagtgagctatgatcatgccactgcactccaacctgggtgacagagcaagacctccaaaaaaaaaaaaaaaagagctgctgagctcagaattcaaactgggctctcaaattggattttcttttagaatatatttataattaaaaaggatagccatcttttgagctcccaggcaccaccatctatttatcataacacttactgttttccccccttatgatcataaattcctagacaacaggcattgtaaaaatagttatagtagttgatatttaggagcacttaactatattccaggcactattgtgcttttcttgtataactcattagatgcttgtcagacctctgagattgttcctattatacttattttacagatgagaaaattaaggcacagagaagttatgaaatttttccaaggtattaaacctagtaagtggctgagccatgattcaaacctaggaagttagatgtcagagcctgtgctttttttttgtttttgtttttgttttcagtagaaacgggggtctcactttgttggccaggctggtcttgaactcctaacctcaaataatccacccatctcggcctcctcaagtgctgggattacaggtgagagccactgtgcctggcgaagcccatgcctttaaccacttctctgtattacatactagcttaactagcattgtacctgccacagtagatgctcagtaaatatttctagttgaatatctgtttttcaacaagtacatttttttaacccttttaattaagaaaacttttattgatttattttttggggggaaattttttaggatctgattcttctgaagataccgttaataaggcaacttattgcaggtgagtcaaagagaacctttgtctatgaagctggtattttcctatttagttaatattaaggattgatgtttctctctttttaaaaatattttaacttttattttaggttcagggatgtatgtgcagtttgttatataggtaaacacacgacttgggatttggtgtatagatttttttcatcatccgggtactaagcataccccacagttttttgtttgctttctttctgaatttctccctcttcccaccttcctccctcaagtaggctggtgtttctccagactagaatcatggtattggaagaaaccttagagatcatctagtttagttctctcattttatagtggaggaaataccctttttgtttgttggatttagttattagcactgtccaaaggaatttaggataacagtagaactctgcacatgcttgcttctagcagattgttctctaagttcctcatatacagtaatattgacacagcagtaattgtgactgatgaaaatgttcaaggacttcattttcaactctttctttcctctgttccttatttccacatatctctcaagctttgtctgtatgttatataataaactacaagcaaccccaactatgttacctaccttccttaggaattattgcttgacccaggtttttttttttttttttttggagacggggtcttgccctgttgccaggatggagtgtagtggcgccatctcggctcactgcaatctccaactccctggttcaagcgattctcctgtctcaatctcacgagtagctgggactacaggtatacaccaccacgcccggttaattgaccattccatttctttctttctctcttttttttttttttttttgagacagagtcttgctctgttgcccaggctggagtacagaggtgtgatctcacctctccgcaacgtctgcctcccaggttgaagccatactcctgcctcagcctctctagtagctgggactacaggcgcgcgccaccacacccggctaatttttgtatttttagtagagatggggtttcaccatgttggccaggctggtcttgaactcatgacctcaagtggtccacccgcctcagcctcccaaagtgctggaattacaggcttgagccaccgtgcccagcaaccatttcatttcaactagaagtttctaaaggagagagcagctttcactaactaaataagattggtcagctttctgtaatcgaaagagctaaaatgtttgatcttggtcatttgacagttctgcatacatgtaactagtgtttcttattaggactctgtcttttccctatagtgtgggagatcaagaattgttacaaatcacccctcaaggaaccagggatgaaatcagtttggattctgcaaaaaagggtaatggcaaagtttgccaacttaacaggcactgaaaagagagtgggtagatacagtactgtaattagattattctgaagaccatttgggacctttacaacccacaaaatctcttggcagagttagagtatcattctctgtcaaatgtcgtggtatggtctgatagatttaaatggtactagactaatgtacctataataagaccttctgtaactgattgttgccctttcgtttttttttttgtttgtttgtttgtttttttttgagatggggtctcactctgttgcccaggctggagtgcagtgatgcaatcttggctcactgcaacctccacctccaaggctcaagctatcctcccacttcagcctcctgagtagctgggactacaggcgcatgccaccacacccggttaattttttgtggttttatagagatggggtttcaccatgttaccgaggctggtctcaaactcctggactcaagcagtctgcccacttcagcctcccaaagtgctgcagttacaggcttgagccactgtgcctggcctgccctttacttttaattggtgtatttgtgtttcatcttttacctactggtttttaaatatagggagtggtaagtctgtagatagaacagagtattaagtagacttaatggccagtaatctttagagtacatcagaaccagttttctgatggccaatctgcttttaattcactcttagacgttagagaaataggtgtggtttctgcatagggaaaattctgaaattaaaaatttaatggatcctaagtggaaataatctaggtaaataggaattaaatgaaagagtatgagctacatcttcagtatacttggtagtttatgaggttagtttctctaatatagccagttggttgatttccacctccaaggtgtatgaagtatgtatttttttaatgacaattcagtttttgagtaccttgttatttttgtatattttcagctgcttgtgaattttctgagacggatgtaacaaatactgaacatcatcaacccagtaataatgatttgaacaccactgagaagcgtgcagctgagaggcatccagaaaagtatcagggtagttctgtttcaaacttgcatgtggagccatgtggcacaaatactcatgccagctcattacagcatgagaacagcagtttattactcactaaagacagaatgaatgtagaaaaggctgaattctgtaataaaagcaaacagcctggcttagcaaggagccaacataacagatgggctggaagtaaggaaacatgtaatgataggcggactcccagcacagaaaaaaaggtagatctgaatgctgatcccctgtgtgagagaaaagaatggaataagcagaaactgccatgctcagagaatcctagagatactgaagatgttccttggataacactaaatagcagcattcagaaagttaatgagtggttttccagaagtgatgaactgttaggttctgatgactcacatgatggggagtctgaatcaaatgccaaagtagctgatgtattggacgttctaaatgaggtagatgaatattctggttcttcagagaaaatagacttactggccagtgatcctcatgaggctttaatatgtaaaagtgaaagagttcactccaaatcagtagagagtaatattgaagacaaaatatttgggaaaacctatcggaagaaggcaagcctccccaacttaagccatgtaactgaaaatctaattataggagcatttgttactgagccacagataatacaagagcgtcccctcacaaataaattaaagcgtaaaaggagacctacatcaggccttcatcctgaggattttatcaagaaagcagatttggcagttcaaaagactcctgaaatgataaatcagggaactaaccaaacggagcagaatggtcaagtgatgaatattactaatagtggtcatgagaataaaacaaaaggtgattctattcagaatgagaaaaatcctaacccaatagaatcactcgaaaaagaatctgctttcaaaacgaaagctgaacctataagcagcagtataagcaatatggaactcgaattaaatatccacaattcaaaagcacctaaaaagaataggctgaggaggaagtcttctaccaggcatattcatgcgcttgaactagtagtcagtagaaatctaagcccacctaattgtactgaattgcaaattgatagttgttctagcagtgaagagataaagaaaaaaaagtacaaccaaatgccagtcaggcacagcagaaacctacaactcatggaaggtaaagaacctgcaactggagccaagaagagtaacaagccaaatgaacagacaagtaaaagacatgacagcgatactttcccagagctgaagttaacaaatgcacctggttcttttactaagtgttcaaataccagtgaacttaaagaatttgtcaatcctagccttccaagagaagaaaaagaagagaaactagaaacagttaaagtgtctaataatgctgaagaccccaaagatctcatgttaagtggagaaagggttttgcaaactgaaagatctgtagagagtagcagtatttcattggtacctggtactgattatggcactcaggaaagtatctcgttactggaagttagcactctagggaaggcaaaaacagaaccaaataaatgtgtgagtcagtgtgcagcatttgaaaaccccaagggactaattcatggttgttccaaagataatagaaatgacacagaaggctttaagtatccattgggacatgaagttaaccacagtcgggaaacaagcatagaaatggaagaaagtgaacttgatgctcagtatttgcagaatacattcaaggtttcaaagcgccagtcatttgctccgttttcaaatccaggaaatgcagaagaggaatgtgcaacattctctgcccactctgggtccttaaagaaacaaagtccaaaagtcacttttgaatgtgaacaaaaggaagaaaatcaaggaaagaatgagtctaatatcaagcctgtacagacagttaatatcactgcaggctttcctgtggttggtcagaaagataagccagttgataatgccaaatgtagtatcaaaggaggctctaggttttgtctatcatctcagttcagaggcaacgaaactggactcattactccaaataaacatggacttttacaaaacccatatcgtataccaccactttttcccatcaagtcatttgttaaaactaaatgtaagaaaaatctgctagaggaaaactttgaggaacattcaatgtcacctgaaagagaaatgggaaatgagaacattccaagtacagtgagcacaattagccgtaataacattagagaaaatgtttttaaagaagccagctcaagcaatattaatgaagtaggttccagtactaatgaagtgggctccagtattaatgaaataggttccagtgatgaaaacattcaagcagaactaggtagaaacagagggccaaaattgaatgctatgcttagattaggggttttgcaacctgaggtctataaacaaagtcttcctggaagtaattgtaagcatcctgaaataaaaaagcaagaatatgaagaagtagttcagactgttaatacagatttctctccatatctgatttcagataacttagaacagcctatgggaagtagtcatgcatctcaggtttgttctgagacacctgatgacctgttagatgatggtgaaataaaggaagatactagttttgctgaaaatgacattaaggaaagttctgctgtttttagcaaaagcgtccagaaaggagagcttagcaggagtcctagccctttcacccatacacatttggctcagggttaccgaagaggggccaagaaattagagtcctcagaagagaacttatctagtgaggatgaagagcttccctgcttccaacacttgttatttggtaaagtaaacaatataccttctcagtctactaggcatagcaccgttgctaccgagtgtctgtctaagaacacagaggagaatttattatcattgaagaatagcttaaatgactgcagtaaccaggtaatattggcaaaggcatctcaggaacatcaccttagtgaggaaacaaaatgttctgctagcttgttttcttcacagtgcagtgaattggaagacttgactgcaaatacaaacacccaggatcctttcttgattggttcttccaaacaaatgaggcatcagtctgaaagccagggagttggtctgagtgacaaggaattggtttcagatgatgaagaaagaggaacgggcttggaagaaaataatcaagaagagcaaagcatggattcaaacttaggtattggaaccaggtttttgtgtttgccccagtctatttatagaagtgagctaaatgtttatgcttttggggagcacattttacaaatttccaagtatagttaaaggaactgcttcttaaacttgaaacatgttcctcctaaggtgcttttcatagaaaaaagtccttcacacagctaggacgtcatctttgactgaatgagctttaacatcctaattactggtggacttacttctggtttcattttataaaagcaaatccaggtgtcccaaagcaaggaatttaatcattttgtgtgacatgaaagtaaatccagtcctgccaatgagaagaaaaagacacagcaagttgcagcgtttatagtctgcttttacatctgaacctctgtttttgttatttaaggtgaagcagcatctgggtgtgagagtgaaacaagcgtctctgaagactgctcagggctatcctctcagagtgacattttaaccactcaggtaaaaagcgtgtgtgtgtgtgcacatgcgtgtgtgtggtgtcctttgcattcagtagtatgtatcccacattcttaggtttgctgacatcatctctttgaattaatggcacaattgtttgtggttcattgtctccttaaattagactgtaagcaccttgatggaactcatactaccttttatttcacacacacgcacacgcgcacacacagcctacacatacactgcctagctcattgtagcatactaaatactgattttaatgaataagctaaaccttcgaaacccatttgctaatcccagcactttgggaggccaaggtgggtggatcacctcaggtcagaagtttgagaccagcctggccaacatggtgaaaccccacatctactaaaaatacaaaaattagctgggcgtggtggccaatgccttgtaatcccagctattctggaggctgagacaggagaatcgcctgaacctgggaggcggaggttgcactgagctgggattgtaccactgcactccagcctgggtgacaaagtgagactccatctcaaaaacaaacaaacaaaaacacatcatttcccctatagcaaaaacatgacggcacttactgtatcaagagaggtgagaaaaaggagccacagcaggatgattcaagggactctgcatagctccattttaagaatatgcctactgcaggtcagagaaggtaagcaaactgcctaaggccacacagccaggtacagaactctcaccaatattattgccagcaatcgcaattttggtgtttattcttggtaccaagttggagactatagggttctcttcctaatagagaccatctagcctttcactgttttgtggatacttctttctcttcttctttttttttttcccttttaaaatctagttatttttttctttttggtttctttgacacagggtctcttactctgttacccaggctggaatggagtagtgcagtcatggttcactgtagctttgacttcctgggctcaagcgatcctcctacctcagcttcccgagtagctgggaccacaggcgcccaccaacacctccagctaatttttaagtttttactagagacaacatctcactatgttgcccaggctggtctcaaaatcctgggctcaagtgatcccacctcagccttccaaaatgctgggattacaggtgtgtgcaccacgcctggcctattttttttttaattgctcataaatcatcttttttctttaaaaaaaagaaagatgggaggctaaagcaggagaatcacttgaacccaggaggcggaggttgcagtgagctgagatcatgctgctgctctccagcctgggcaacaagagtgaaactccatctcaaaaaaaaaaaaaaagaaagtacacaattttactttctggacctaatggtcaaggccaataatttggtcacctatgaaataaataaaagctttaccatatatatgaccatttgataatgtaatatgaaatgtttatgtactaaaggcagaatagtctagaaaaaacattctgtatcacaacgtctaaaaatgaatatcatcttcatcatagaaccaggctctttctcctaatttttttttttgagatggagttttgctctgtcacccaggctggaatgcagtggcacaattttggctcactgcaaccttcagctcccaggttcaggatcaagtgattttcgtgcttcagccttctaagtagctgggattacaggtgactgccaccacacccagctcatttttttgtatttttttagtagagagagggtttcaccatgttggccaggctcgtctcgaactcctgacctcaaataatccacccgtctcagcctcccaaagtgctgagattacaggcgtgagccaccaggcctggcctcctaatttttatttgtagaagtggcaccaaaattttccaagttctcatgcaaaaattcaggctcatctcagtttatttttttcatttatttatctcccactaaattgacaacttctaataattaggttggttctttgtattcccagcacagggttctatgcagaatacacacacagcagttgctggcaataatattggtgagagttctgtactgggctatgtgatcttagacagtttgcttatgttctctgacctgccgtaggcacattcttaaaatgaagctgttcagaccccctcgattcatcctgctgtggcttctttttcccacctaaatcttaaatacccttttagctgctagtaagtgaatgatgtttttttatgaactttctgaagtcagattagatgaagttgagaaaagcctgatattcttataaagttatatatgtgcatcatagaaaacttagaaaatacagataaacaaaaatcatccatggacgaaccttgaagacattgtgttaactgaaataaaccggacaccaaaggacacatgttatatgcttccacttatatgagatacctagaatagttacatttggttactctgggtacattgcctatagataagccttgctccacaaggagcagttaaaaaaaaaaaaaagataaattcataggatggaaggtagaatagtggttactagggacttggggagggggaaatggggagttactgtttgatgagtgcagatttcagtttgggatgatgaaaaagttctggagatagatagtggcaatggtaacacaacagtgtgaaaataatgccactgaactgtacacttaaaatgattaaaatgataagttaattgtaatttgtgttatccagaaatggttagcaatttattggtgtatattcttttagtattcctgtgtgtgcacaggggtgcttgtatatactttatctttaaaatatatccaggaagctaggcacagtggcttacacctgtaatcccagcactttgggagggtgaggcaggaagattgcctgagccccggaggtcaaggctgcagtgagttgtgatcacgctactgcactctgttctgggcaacccctgtctgggaaaaaaaaaaaaattagtgaggcttagtggtgcacacctgtagtctcagctacttgagtggctggggtaggattgcttgatcccagcaagttgaggccgtggtgagccatgatggtgccactgcactccatcctgggtgatatggtgagaccctgtctcaaaaacaagaaatccagataattctgtgcattataatctagcttttactggatcattaaaattcttttttctttttttttttttttttctgagatggagtttcactcttgttgcccaggctggagtgcagtggtgtgaccttggctcaccgcatcctctgcctcccgggttcatgcgattctcctgcctcagcctcccgagtagctgggattacaggcatgtgccaccatgcccagctaactttgtatttttagtagagacagggtttctccatgttgaccaggctggtctcaaactcctggcctcaagtgatccacccacctcggcctcccaaagtgctggggttacaggcgtgagccaccgcactcagcctgggtcgttaaaattcttaagtgacttcatttttaattactatatgggattctatctttccagtgtatcatgatttatttgacctattgctgaatgttggaggtttcagggtaagaggcacagtttgctattatgtacatcactatagtggcatcctgatagctaaatatttgcctacatccctgattatttccttagtctaaattactgggactaggattttggtgtttgatacatgttactaaattgttttttagaaagattaaaccagtttatgctcttccagcccctgtggtatatgatagttcccattttcctgtaccttgccaacactgggtgatatccagttttaaaatctaaatcttgcattgctatgagaactacaattagagaaggcttatcttctactgcccattctctgtacagagcaaatccctctagacctgaagccccttggagttgtcaagaaacctttgagatgactccccactctgtatctgagctgtcaccagtattctccacttcttcaggattgccatggcaactaaattgatgaaaagatttaggaggccttttctctctttgcaattcctatgatcctttttgaatgtgggtttgggactctgtcaatatacccatcatctaattctgtccattgtgttttaaagtttaaggttgcaatttctgattacatctgccttagccatactgtattatatttgacattcaatatacaatgtccttgtttttctgtatttctaatcttattcccagagatgtgtctatttgttcaggattcattttgcaacgtgtttttactaagcatctacccaaaaccgttgaagtcagatttcaggctgtcttacgtctaaagtagcacaggcaggaaaaactattgaagtgggatttttttttccctttttgtactgaaccgagaaaaagtatatagatgatagagaattcctaatttggtatcattgatatctgggtttttgtttgtttttacagaagactgattaactatacttatttattaatttatcttctcattaataaacacttgctgagtgcttactgtctgctaggcattagggagacaaatatgattaagggaagcttcctcctatcaaggtcatgtgttccatttgggtatactaatgcattagcaatgtaaatcaagtagtgagagatcatctgttcccgataggagatggattattggtggggacttctgtgtgtgtgtgtgtgtgtgtgtgtgtgtgtgtgtgtgtatgtatgtgataaaataaatataggaaatgttaattatagattctaagtagtagatatataaacactcattgcaaagttgcttcaagttttctgtatatttgaaaatattcacaacatgtcgacaaaactagcatgataaagccactatttgtgctaagacttcagcttgtatctggattaggcttattatgtagtagtaggaacattagaaatagttttaactcattaaatacacatgttttatgggaaggttttatatatatatttatatgtaatgaatgtgaacaaacaagggtcagatatacactctgcttccctccagaccagttccggctgctctgctgcacatttcaggagtcttattagaattagccacattctgcccacttgcccttacttctcatatttcacaactcctcctggtggggacttaaggagacattcaaactaggccttgaaagatgagaatttttccaagtggaaaaagaggagtggcagcaagtaaggtaaaggtacagagtcatggaattcccaggaaacgtaaagttgtcatgtgttataggaaaacaacttgtgtgaggggtgttgggagaaatgagagataataccagggtataaagggccttttgaatgctatgttgaggaattttatcctaatggcagtaatgactaacaattatatagtgttcaaaaagtataaatcagcagtggtataccactaagggtttttttcttttctttttttttttgagacagagttttgctctgttgcccaggctggagtgccgtggcacgatctcagctcactgcacttccgccacctgggttcaagtgattcttctgcctcagccagtgtttcactgtgatggccaggatggagcactaagggtctttatggaagaaaaagacatgataaacaaggcttttagggaacttctacagtaatgtagctgtattaaaagtagagatcagagcagcatagtagaagtagaaggctagagctaattgaaggagcacttcagaattagaatcaagaagtcttagaaacctattggttttattctccctaatgtatttggccacttacctgctggggaatttgtctaagttataaaaaataattcctttgggaaacccaaaggaaagttatctattaataattaccccactactttttctgatttatgtaatggccacgtagaggttagatgtgatggttgtgacagtagtgactaatacagcctgtgaagcattttggtcagatatctatgtgctttcattccaggttgactgaggcaagactttggctagggtttgatcagtgatgtaactactcacgagtaccacgtggtggcaatggcattgctgcagaccttggcagcaaagcagtgttagagtagcagtagaaacctttgtgaagctaggaatacattttctggtcataaaaacctcctgaaaattgtgaactcagtgtagcaggagaaagaagatggcttgtttttagtaaagggcaaagtcatttttaaggatcagaagaagaaacggagagtgaaacaatgtgttcctgccctactcccccactggactttttggcaaccattgctgttccttctaaaagtgatttttaaacatgtatattttgaagccaggcacagtgactcacgtctgtaatcccagcactttgggaggccgaggcgggcagatcacctgaggtcaggagttcaagaccagcctggccaacatggtgaaaccccgtctctactaaaaatacaaaaattaggccaggtgtggtggctcacgcctgtaatcccagcactttgggaggccgaggcgggaggatcatgtggtcaggagatccagaccatcctggctaacacggtgaaacaccatttctactaaaaatacaaaaaattagctgggcatggtggcgggcgcctgtaatcccagctactcaggaggctgaagcagaagaatggcttgaacctgggaggcggagcttgcagtgaaccaagattgcgccactgcactccagcctgggcaacaaagtgagactccgtctcaaaaaaaaaaaaaaaaattagtcgggcatggtaacaggtgcctgtaatcccagctacttgagaggctgaggcagggagaattgcttgaaccaggtaggcggaggttgcagtgagccaagatcgcaccactgcactccagcctggggcaacagagcaagactgtctcaaaaaaaataaataaataaaataaattcttaagaaggatattttggaaaactccttacatacctaaattctttgtttatcaaatacttggacttagcacactcttctttgaaatggaccaataaacaacaggagcccataagcaaaaagaactcattattttaaaaacagtaactatccttacaggctttctcagggctctttctgttggatccttccctctcacaggtccttgctaatgatctctaggtggacacattctagatgagatgtccctgtctagaatggcagcaccatgagggctatatcctcagtactaggacagcgcctggtgcttaatagatagtaaatagttgtctaattaactgagcaaacagatagattcatgaattagctttttgctttttctgttagaaactaaaggttcaggtcaggcacaatggcgcatgtctctaatcccagcactttgggaggccgaggcgggctgatcacttgaggtcaggagttcaagaccagcctggccaacatagtaaaaccctgtttctacaaaaattaccaaaattagccgggcgtcttggcaagcacctgtaatgccagctacttgagaggctgaggtgggagaatcgcttgaacctgggaggaagaggttgcagtgagccgagatggtgccaacctgggtgacagagggagacttaaaaaaaaaaagaaagaaagaaagaaaagaaactaaaggttcaaagaatcccagaaaaggaagagtcctcacaagccagtaatctaggcaggattactgatagtatttttatatttgttgtatttttataaaatgccatagatagagggcttttttcaacattacatcagtctaaaaatcacacatttttatatgaactaacctaaatgtctgatgaatctcacaacaccaagtctttgaaatgtgcccatataaataaaatgttaacagattcatgctaattttaaatatcgatagtgtttaaatgccttaattattttttcactccctagctttaaaagaaaataaccaacttcaaaaggacatcacaataacatcaagtctatttgggggaatttgaggattttttccctcactaacatcatttggaaataatttcatgggcattaattgcatgaatgtggttagattaaaaggtgttcagctagaacttgtagttccatactaggtgatttcaattcctgtgctaaaattaatttgtatgatatattttcatttaatggaaagcttctcaaagtatttcattttcttggtgccatttatcgtttttgaagcagagggataccatgcaacataacctgataaagctccagcaggaaatggctgaactagaagctgtgttagaacagcatgggagccagccttctaacagctacccttccatcataagtgactcttctgcccttgaggacctgcgaaatccagaacaaagcacatcagaaaaaggtgtgtattgttggccaaacactgatatcttaagcaaaattctttccttcccctttatctccttctgaagagtaaggacctagctccaacattttatgatccttgctcagcacatgggtaattatggagccttggttcttgtccctgctcacaactaatataccagtcagagggacccaaggcagtcattcatgttgtcatctgagtacctacaacaagtagatgctatggggagcccatggaagatacatggtatacaacatagctcttgctctattggaagctaagtggaatgggagaaattggtgacaggcaaccccataatttcagaaagctatgaaaaagtactcagacatattccttataacactggtgtcacatcacaaagacctatttaatgtgcttctgatttatagggagagacatcctatacttcaggaactgcactttgatccacagaaagcctagtgatgtagagctcctgttagttcaaaaggaaaagaaaagaacaacacagaaagcctaattatgcaatagagtcaagtgctttatagcaatgttacagttatcaaaaaaaatccagatggacctctgagaggatgccattggagtaaccaggcagatgcagttgatcagagctgacttcctataagaagtgagcactgagctgaggaataatggcataaatgaaggaaagtgagatggaaatttgagtttttaattggaaagacaatacatcaggcagatttttaaataggggcaaacaaacagacacataggagatgctaggcatggggtccccactaggatgctgcttagaaacatgcaggggtggtgagtactcccaaagtacacttcattcctagctcagtgattcttatctgagtgttaaagttccttcttcagcaccccgttccacagtccaactgggaactttaagacctttcttggagtctttctaggaactcaagtctgctacttatacagaacagtggctttggtccccagttgtgccttgcagtatttttgtgttcaggaagaaacagtagctcttggataaagaagctagctagaaactctgttgctatggcagtgcttcaaaatgtatttccttaaatgctttctttgtaactatcttcatttagttcatctctcagataatgagagatcagagtcccatccccagtataatactcttctttagggtactttcaccatcttcagtctaaacacagactagactttcaattataatgtgtaagatttaaaatgttattattgtgtgactttgaatatctgtgtaaatctactatctcctctttggtatatacgtgtgtttatttttttctggagatctgtaactgaaatgcttaatttctgaattgttttggatatcacaacttaataccaacataagttttgagcctttttctccctaaatctggtgtgagtctaactgaaactcaaatgaactttttaaaaataattttttcttttctttaattttttttttaagtagagacagggacgcactgttaactaggctggtcttgaactcctgatcttgagccatcctccccgacctgagcctcaccttatagagagggtcttgctctgttgcccaagctggagggcagtggcataatcacagctcactgcagcctctcgacctcctcaagcgatcctcctgccttagcctcccaagtagctgggactataggcgtccaccaccatacccagctaatttttttttttattttttgtagagacaaggtctccctatgttgcccaagttggtctcaaactcctggactcaagcagtcctctcacctcagggtcccaaagtgctggggttacaggtgtgagccatggcacctggccagaacttctagtaaaaagaatattgttgccgggtacggtggctcacgcctgtaaccccagcactttgggaggccaaggcaggcgaatcacctgaggtcgggagctcgagaccagcctgaccaacatggagaaaccacatctctactaaaactacaaaaaattagccgggcgtggtggcacatgcctgtaatcccagctacttgggagctacggtgcctggcctagtttattatttcttaatatctgttgtcttccagtgtcttccttaattcttcacaataccctgtacaatgcttagcacacagtgggcagtctgtaagtttattaaatgtttggtgtggcccatacttcctatccacaaagaatgtaacatgttaagacatctagatgagggaatgatttaagaggaactacaataatattctgaaacttggactctggatctctgcatttagactttcctaaaccagccagcaagtagatcatcatgtcacaaggcttaggttgggcttgctgttcagagaatgaattaaggattaaggagaaaaaaaagcagaaaggttttgctctgtttttcaggttctattgagttgttaacttctaacaagttatcttatttgcttcattgcatgaggcccattgtagtaagaagaggaatttatatgctaaatgttctggtgatagaatgacttttctttttttttacagtccaaaggtcttttttttttttttttaacacctattatgccatgaattcatagggaataggttccagctgctcaggctccttcccattggttctcacaaagtgtgcttctctgggtggagcaggctggtgcttcagttgaacccacgtacctttctctttggcttctttctttttctgatcattttccttcacgcgtttcaggaagctgtcttggctcttagagtgtttaatgtgctcaatacgcacattaattctcttggcaagaatcttgcccttaacttgtttacagcgatgccaacagcatgctgggtcacgttgtagacttttccagttttgccatggtaacacttgtggggcattcctttttgaacagtacccgttcccttgatgtctacaatttcacctttcttacagattcgcatatacatggccaaaggaacaactccatgttttctaaaaggcctagagaacatatatcaggtgcctctcctctttccctttgtgttcgtcattttggcaaattactgaaagatggtggttctggccaaaaggaggaatgactttttaatagctgtgtttgtatctgagccttccctctgcctttcattttttttgttttgttttgttttgtttttgtttgagatgaagtttcacttttgttgcccaggctggagtgcaatggtgtgatttcggctcattacaatgtccgcctcagcctcctgggtagctgggattacaggcacccgccaccacgcccagctaatttttgtatttttagtagagacagggtttcaccatgttggccgggctggtctcaaactcctgacctcaggtgatctgtccacctcggcctctcaaagtgctgggattgtaggcgtgagccacatcacctggccacttttttaactctttccaatggttaattccgtttgatatggttccttggaacttgcacattaccctttatcaattatcaccctgtattgggggtggggaggatgatacctctcttcatagttagatcctacttactttcaacagagttcttaacaatcctagaaactcacaggtccagaaaagacaagcataaaggaaactataaataatgcatttgaagactaactcaggaaatcaatgattatttccccccaggctacccagtgtcttaaaaaaacagtttaattaatacaatcttttgtttcaattttctacctatatttatggcttttagcttttctaataaaagctcaaaatgaattacagtcatcagtgactttttaatgaatagaagacttttgcaatttttaactatttgtttttacttattaaatatttccgccttggccaggcatggtggctcacgcctataatcccagcactgtgagatgccaaggcaggaggatcacttgagtttaagagttctagaccaggctgggtatggtggctcatgcctataatcccagcactttgtgaggccaaggttggcggatcacctgaggtcaggagtttaagaccagcctggccaacatggtaaaaccccatctctacaaaaaatacaaaaattagccaaggggtggtggtgggcacctataatcccatcttcttgggaggctaaggcaggagaatcgcttgaacctggaggcagaggttgcagtgagccgagatcatgccactgtattccagcctgggtaacagagcaagactctgtctcaaaaaaaaaaaaaagtttgaaaccagcctggtcaacacagcaagacacccatctcgttgaaaaataacggtcgggcgcagtggctcacgcctgtaatcccatcactttgggaggccgaggcaggcagatcacctgaggtcgggagttcgagaccagcgtgaccaacatggagaaaccccatctctactaaaaatacaaaattagttgggcgaggtggtgcatacctgtaatcccaactacttgggaggctgaggcaggagaacagcttgaacctgggaggcagagaggttgtggtgagccaagatcatgccattgcactgcagcctgggcaacaagagcaaaactccatctcaaaaaaaataaataaataaaaataaataaataagtacttctgcctttaagccacttcctagaaggcagtggcacaaagtgatacatttggaggagtaaatatattacaaaatgaattaggctgggcgcagtggctcatgtctgtaatccccgcactttgggaggccaaggcgggtggatcacttgaggtcaggagttcgagactagcctgatcaacagggtaaaatcccatctctactaaaaataccaaaaaaactagctgggcgtggtggcaggcacctgtaatgtcagctactaggaaggctgaggcaggagaatcgcttgaacccaggaggtggaggttgcagtgagccaagattgcaccattgcacttcagcttgggcaacagagtgagactccgtctcaaaaaaaaaaaaagaactaacatgccagaactttgccttcagtatgttttgtgatttttcccttcttgtgccatttcatcattagttccatgtattatttaagatttcttatcaaccagcaccttgggatttttttgtgtatgtgttggtttagggggtttatttgtttttttcttttttttcggtaattgaaaatgtgaagcaaaatgtcacctgttttttctttcatgtctgacactcatgtcttgtttacccccgacatgcagaagctgaaatccccatttcatacagtcttcaatgtggaggcagtagggatggagaaaataatgtactttgtgctctccggtactctttctttcctattgtctgaggggatttgggcataatttattttgctgcagagataaaaatttgttatatatattttttatcattcagggccaaggaatatagattttttttttcagccttgtctcagctgggtgtctttatttactctgtcttaaagtgttccttttattatcattattattttttaatcattgaattccatttggtgctagcatctgtctgttgcattgcttgtgtttataaaattctgcctgatatacttgtttaaaaaccaatttgtgtatcatagattgatgcttttgaaaaaaatcagtattctaacctgaattatcactatcagaacaaagcagtaaagtagatttgttttctcattccatttaaagcagtattaacttcacagaaaagtagtgaataccctataagccagaatccagaaggcctttctgctgacaagtttgaggtgtctgcagatagttctaccagtaaaaataaagaaccaggagtggaaaggtaagaaacatcaatgtaaagatgctgtggtatctgacatctttatttatattgaactctgattgttaatttttttcaccatactttctccagttttttgcatacaggcatttatacacttttattgctctaggatacttcttttgtttaatcctatataggttttttgaacctataacataagctacaacatgagaaatgtgcggttagatagatatgtcccttctgaaggtcagaaaaaaatataatggaggtaaaacctgaacaagcttggaaactgatggtagacttcttcaaggcagcccttgccctaattaaaattcttgtctttctagaaaaagtctagctgttgatttaccacagaaaataataataataattactattattattattttttgagacagggtcgccctgtgtcacctagattgcagtggtgcagtcatggctcactgcatcctccgtttttcaggctcaagcaatcctcccaccttagcctcctgagtagctgggtccacaagcatgcgccacccacacccactaagtttttgtatttttggtagagatggagttttaccttgttgcccaggctggtctcaaattcctggactcaagtagtccgcccgccttgccctcccaaagccagaaaacatttagaatatctttcagagatgtgtatttacaccactattaacacagggctgtatagcagtccagtactggactatgtagtccagtactattcttttccttactggagggccaggcgtggtggcaggtgcctgtaatcccagctactcaggaggctgaggcaggagaattgcttgaacctgggaggcagaggttgcagtgagctgggaccgtgccattgcactccagcctgggcgacagagcaagactccgtctcaaaacaaaaaaaaaaagagagagagagcagtaattcaggtctcacccatcttcaatccagggggcctagccttagtatttgacccatagtaagcacccaataattgtttaaattaattaacctctgaggccctttaaatctgttgataagtatcttattttgcaaagtcctaagcacttggaagagcagaggaactatttactgggtgtgtatgcttttctaacaatattttatagctggcttttgtttttagaatgaatttgaacattgaaaaggcaggcaatagggatgattctgtgaattctgctaaaactgagtagaaagaatgagtgtagagatgtcgacattgatcaactttctatcttcataagagatctgattctaacatatccatttagactcaagtagaatattgtgtatagagtgagtggcagtgagtaatttggtaaaaatttgctgacctgcttttattctttcctcctttctttcttcctttccttccttccttccttccgtcctttcctttcctttccctcccttccttccttctttccttctttctttcctttctttcctttcttcctttctttccttcctcccttccttttcttttctttctttcctttccttttctttcctttctttcctttcctttctttcttgacagagtcttgctctgtcactcaggctggagtgcagtggcgtgatctcggctcactgcaacctctgtctcccaggttcaagcaattttcctgcctcagcctcccgagtagctgagattacaggcgccagccaccacacccagctactgacctgcttttaaacagctgggagatatggtgcctcagaccaacccaaccccatgttatatgtcaaccctgacatattggcaggcaacatgaatccagacttctaggctgtcttgcgggctcttttttgccagtcatttctgatctctctgacatgagctgtttcatttatgctttggctgcccagcaagtatgatttgtcctttcacaattggtggcgatggttttctccttccatttatctttctaggtcatccccttctaaatgcccatcattagatgataggtggtacatgcacagttgctctgggagtcttcagaatagaaactacccatctcaagaggagctcattaaggttgttgatgtggaggagcaacagctggaagagtctgggccacacgatttgacggaaacatcttacttgccaaggcaagatctaggtaatatttcatctgctgtattggaacaaacactttgattttactctgaatcctacataaagatattctggttaaccaacttttagatgtactagtctatcatggacacttttgttatacttaattaagcccactttagaaaaatagctcaagtgttaatcaaggtttacttgaaaattattgaaactgttaatccatctatattttaattaatggtttaactaatgattttgaggatgagggagtcttggtgtactctaaatgtattatttcaggccaggcatagtggctcacgcctgtaatcccagtactccaggaggccgaggcaggtggatcagctgaggtcaggagttcaagacctgtctggccaacatggtgaaaccctgtctctactaaaaatacaaaaaaattaactgggtgtgctagtgcatgcccgtaatcctagctactctggaggctgaggcagcagaatcacttgaacccgggaggcggaggttgcggtgagccaagatcacaccactgcactccagtctgggtgacagagcaagactccatctcaaaaaatatatatatatatatatacacacatatattttatttcaactgttagacaagagtccaaaggccaaagaataaagttttaggccagtcctttattagaaaatgagtcaaatcccaaagcaagtttttttatgagttaatgaatataaatgactacatattttatgccttaaaaatcacttttaatgaatggtgttttatggcttgtaaatcagagttttaatcagtaaagaaagtttttaatcctcaaaaacacgttatcataaaagacactgtttggcatcaaatgtggtatttggccatgttcattagggtcattttaggaatctcatacattctacttagctatgcttaattcctgataccatggcattttctgaaatgtttcaaggatgacatctctgctgtttttaatttggtaatgatatctgctgatttattaagtgaaaaaagtaatggtgtcattaccttggatgaagaaacaaaaataaagcatttgccacatttttcaactttgttttcctttcttacaaaattgctataagctcattgcccccaaattggacaatatagggaataaaaaagataatttggggtggggttagacacgggtcttgttatgttgccgaggctggtctctaactcctggcctcatgcaatcttcctaccttggcctcccaaagtgctgggattataggtgtgagccacttcaccaagctgagatgccacctcttaaaagagagaataaggacagattacagccactgctcatgcctgtaatgtcagtactttgggaggccaaggtgggagaattgctcgaggccaagagttcaagaccagcctgggcaatgtagcgagacctgatctctatgaaaaggggggtgggggggaaaactagctggggccaggcgtggtgggtggcttacgcctgtaatcccagcactttgggaggccgaggcgggcagatcacctgagggcaggagttcaggaccaacctgaccaatatggagaaaccctgtctctactaaaaatacaaaattagccaggcttggtggcttatgcctgtagtcccagctactcgggaggctgaggcaggagaatcgcttgaacctgggaggcagaggtttcagtgagctgagatcgcgccattgcactctagcctgggcaacaagaatgaaactccatctcaaaaaaaaaaaaaatcagctggaaggtggcaaacacctgtggtcccagctactcaggaggctgagacaggaagatcacttgagtccaggaggtcaaggctgcaggtgagccatgtttgtgccactgcactgcagcctggatgacagaccgagacccttctcaaaaaaaaaatttttcccggtatttttttttgggggggggtttaattcttgttgcccaggctggggtgaattggggaattttgggttaagggaaccttcggcttcctgggttggggggtttttcctgtttaggcttccccagtagctgggattacaggcatgcaccaccacgcccggctaattttttgtatttttagtagagacagggtttctccatgttggtcagactggtctcgacctcttgacctcaggtgatccgcccaccttggcctcccaaagtgttgggattacaggcctgagccaccgcacccggcctgtactcttattctttaataataaaatatttctgtgtttctttagtcattttacataaacttttatttatttatttatttttatttatttatttttttgagacggagtctcgttctgttgcccaggctggaatgcaatggctcaatctcagctcactgcaagctctgcctcccgggtacacgccattcccctgcctcagcctccctagtagccgggactacaggcgcccgccaccacgcccagctaatttttttttttgtattttcagtagagacagggtttcactgtgttagccaggatggtcttgatctcctgacctcgtgatccacccgtctcggcctcccaaagtgctgggattacaggtgtgagccaccgtgctcggcccataaacttttatttttaaaataatgtcatgataaataatattgcttaggtgtctttaatatattagtaacatttctgttttattgtacatcaacatttatattcaaattaatgggtgaagagtactccattggactaggtatatcgtaatttaatctcctattattggacaactacattgtttctaaaattatactattcctatgactaaacctttgcatatatcttttatctccctaggatatatttctaaaactagcattgttgactgaaagtgtaaatacgtgttaaggtgtttgctacataatgccatatttcctttttaggaaactaagctactttggatttccaccaacactgtattcatgtacccatttttctcttaacctaactttattggtctttttaattcttaacagagaccagaactttgtaattcaacattcatcgttgtgtaaattaaacttctcccattcctttcagagggaaccccttacctggaatctggaatcagcctcttctctgatgaccctgaatctgatccttctgaagacagagccccagagtcagctcgtgttggcaacataccatcttcaacctctgcattgaaagttccccaattgaaagttgcagaatctgcccagagtccagctgctgctcatactactgatactgctgggtataatgcaatggaagaaagtgtgagcagggagaagccagaattgacagcttcaacagaaagggtcaacaaaagaatgtccatggtggtgtctggcctgaccccagaagaatttgtgagtgtatccatatgtatctccctaatgactaagacttaacaacattctggaaagagttttatgtaggtattgtcaattaataacctagaggaagaaatctagaaaacaatcacagttctgtgtaatttaatttcgattactaatttctgaaaatttagatctagataaagctatagtgtggattattttatgtatatttacttgagaaaataattattaaatattagtggaaaagctatactttgggtatgatataggactttcgaattggaattttcctttctatctgtaaaagcaagtaggtatagttttattccccagaaggcatctttttctcccccttgtctcacatgggtgaatttaccagcatatttaactaaattcagactggttccaaatgtactgccagatagtagcatttctctagtgtttgttttcatcctggcttgtaagaatgccctgccacttctgccctgcaatatcccttgctattaggattttggcatcaccttgggtccttaatgccagaaatgggaattgcttcatactgtggaaaaatacccattaaaatattaagaccagtaaaacctcgtttctgcttgggctatttgtggatttcagacatcctgagaagtttaccacccctgtaattaattgtcattgtcatcacttcataataaaaataattgcatggccgggcatggtggctcaagcctgtaatcccagcactttgggaggctgaggtggtcagatcacctaaggtcaggagatcaagaccagcctgaccaacatgaagaaaccccatctttactaaaaatacacaattagccgggcgtggtggcgcatgcctataatcccagctactcaggaggctgaggcaggagaattgcttgaacccgggaggcggaggttgcggtgagccgagattgcaccattgcactccagcctgggcaacaagagcgaaactctgtctcaataataagaagaagaattgcgtgaatatttctttaaaactatgatgagataacataccagattatcaaatggattcagtagtgggtgtgccatttattgcacactgagagatgaccaagtcattctgaaatatctttattaatatatccttcctaggatttttcatcctaacttctccataggtagttacttagcataacatctctgtggccagatgtatcccactactaaaagggcaaagtaagctgtggctgccctggtagatacaatgagtaagtgcacagtgatggctataaatgttttcatctcataatcccatgtccagaccagcaatttgctctgaaagctcttacctgtgtctgtttcaatggctcttgatcacttgcctgcacgtccagaattccttatttattcattgaaaattagcgttctttatccctttgttttgcaagttcagctttttagagatggctaaaatggtctaatctttcttggcaaaggcaattctgagctgcagattagactacaagtggcttgggtacatgttgtctttaaacaagcgaagaggaaaactttgagctctattcagacttggtgaagtgtggtaaatttatgatgaaagctactgactgtattacacatgattaattctgaagcccatattaagatgatcttttcagcagttcagcattgctcttctaactgaacagtttcaaggctgggatttcagcaattaatcagttcagaattgctaatgatctggcggagggtggtagcaaaagggggaggatgtcattagcttctctagcctgccttttttcagtgccctgtggcagtatggagtgaggcaacatgaaagaaagatggcctgaccttcatggcagtattgtgcaacacgtaaatactggtgtgagtggctgtggctatggctagtaaatgatggcccttggtaaacaaagttatttatcagacaatacctaccagctaggtcaactgtgcccataattgatctggttaatttcttttgctgcctattgatttttatttggttgatagataatagctagaggactctaaatttctttggggaagaacatgaaccccttctaagccttcttacgagagaattgatcgcttttgcactgacctttagtaacatcctgatttcagtgttttgtaactatcagagggttgagtcttggttttaagccatgtatatctgtagcataactttctgtgtaggctagttacctctcagcttataaagtgtaggctgataaatttatagtacagtagagtgtcactatgcaaagaaacgatcttagggaatcgaatgatatctgctattaaagcaaaattaatatatattttttctttttacttttttttttttttaaagacatgaaatctcactgtattgcccaggctggtcttggtctcagactcttgagctcaagcagtcctcccacctcagcttcccaaagtgctgggattataggcatgagctgccgtgtctggcccagtatatattttttaagttttaagttttgtggtacgtagtaggtttataatattattttgaatccttagttgtaattttatgtctgctgatgtgtacataatttttattaaactatttatttgagacttcaggtatcttttttttttttttgagacggagtctcgcactctcgcccaggctagagtgcagtggcgccatctcggcttactgcaagctctgcttcctgggttcacgccattctcctgcctcagcctcctgagtagctgagactacaggtgcccgccaccacgcctggctaattttttgtatttttagtagagacagggtttcaccgtgttagccaggatggtctcgatctcctgaccttgtgatctgcccgcctcagcctcccaaagtgctgagattacaggcgtgagccaccgcgcccagccgagacttcaggtgtcttagaattttttaaatgtaccctttctgagaaaaacagagacttaaagctaggataactggtattctattttttttttttttttttttttttacctccagcctgggtgacagagcaagactctgtctaaaaaaaaaaaaaaaaaaattcactttaaatagttccaggacacgtgtagaacgtgcaggattgctacataggtaaacatatgccatggtggaataactagtattctgagctgtgtgctagaggtaactcatgataatggaatatttgatttaatttcagatgctcgtgtacaagtttgccagaaaacaccacatcactttaactaatctaattactgaagagactactcatgttgttatgaaaacaggtataccaagaacctttacagaataccttgcatctgctgcataaaaccacatgaggcgaggcacggtggcgcatgcctgtaatcgcagcactttgggaggccgaggcgggcagatcacgagattaggagatcgagaccatcctggccagcatggtgaaaccccgtctctactaaaaaataaaaaaattagctgggtgtggtcgcgtgcgcctgtagtcccagctactcgtgaggctgaggcaggagaatcacttgaaccggggagatggaggttgcagtgagccgagatcatgccactgcattccagcctggcgacagagcaaggctccgtctcaaaaaaaaaaaaaaaaaacgtgaaaaaataagaatatttgttgagcatagcatggatgatagtcttctaatagtcaatcaattactttatgaaagacaaataatagttttgctgcttccttacctccttttgttttgggttaagatttggagtgtgggccaggcacggtggctcacacctgtaatctcagcactttgggaggccgaggcgggtggatcacctgaggtcaggagttcgagaccagcctggccaacgtgttgaaaccccgtctctactaaaaatataaaaattaggtgggcgtggtggcaggcacctgtaatcccagctactcaggaggctgaggcagcagaatcgcttgaacccaggaggtggaggttgcagtgacccaagatcgcaccattgcactccagcctggggacaagagcgagattcttgtctcaaaaaaaaaaaaaaaaaaaaaaggtttggagggtggtgagctgagatagtcaactattaactcctatctacctgctgggactacactggtgaggtggagcctaagtcctaaaacaacaagtgaggcagctggacgcggtggctcgcatcagtaatcccagcactttgggagcctgaggcgggcagatcacaaggtcaggagttcgagaccagcctggccaatatggtaaaacccagtctctactaaaaatacataaattggctgggcgtggtggtgtgcacctgtaatcccagctacttgggaggctgacacagaagaattgcttgaactctggaggctgaggttgcagtcagctgagatcctgccactgcactccagcctggcgacagagtgagactctgtctcaacaacaacaaaagaaagaacaagtgaggcaaaacctggagaccccagcttcatgtaacacctagtttgagtattgttgagagtttttcaggaaaaaagtctgataacagctccgagatagtcttaacatatgaaaaagcaaaaaagggaggagacagatcatttgtcctatacctttctcttttaaggttttaattataacttgtgtaatacaggagacctctgggtgtttttagttgactataaactaaatctgagtacacatttcagggctgctaaaaatgcttatttgaaactgggccgtattaacacaagcagaggctctggagcaagtgaagtacagatccagagccccactgtattctccaatggagtgattgcctgaaagatgatgtcagttttaagcaccgtgcttggtttttaacatggtcactgacaaattggagagtgtttatccagaggtagatggtaaagatacataaaagtaacttgaaatactgtcttttgaagaagaaatgagaagatttaaggaaataagacactgtcttcaagtatctgaagaaccgttacccggaagagaactgttatctggaacaggattaagactcactcatggggctccagaaagcagacgagtgcatggaggacgcagaagatgcagattgtgtggctcaactctaaaatctttctaacaaaattagttctctggatgtgttccagttcacttgatgatgattcttttgtttttgtttttgtttttgaggtgtagtttttcactcttgttgcccaggctgctggagtgcaatggcacgatcttggcttgctgcaacctccccctcccgggttcaagcgattctcctgcctcagcctcccgagtagctgggattacaggaatgcaccaccatacctaattttgtatttttagtagagacagggtttttccatgtcagtcaggctggtcttggactcccgacctcaggtgatccacctacctcggcctcccaaagtgctgggattacaggtgtgagccatcgcgcctagcctatgatgattcttttcacagagatacaggcacttaaggagaggatctaaaccccttggacacattgccgttgaacttctaagatcttaggtttccacttactcatgaaaattataccacagggtcagagggtagtgttcattggagccaggtgccagaacaagttattacaaactactattttagagaaaaatgtcattaaagtttaagataccttaagctataggtttgcatcaaagttaatgaaaggtaaaaagatgccaagcgtggtggctcaggcctgtaatcccagcgctttggggggccaaggcgggcagatcacgaggtcaggagatcgagaccatcctggctaacacggtgaaaccccatctctagtaaaaatacaaaaaattagccgggcatggtggcgggcatctgtagtcccagctactcaggaggctgaggcaggagaatggcatgaacccaggaggcagagcttgccgtgagctgagatccagccactgcactccagcctggctgacagagcaagactgcatctcaaaaaaaaaaaaaaaaaaaaatgcaaatcaaatctaaagtagttcagtctttaaactcaaagccaatacatttgctttgaactacaaatgaactgaagtttttaagtgtaataaatgttactaaatcggcttttgtagcagttaaacaaaaaacttcaaaaattgtaaggattctgtgagggagcatggctgctgctgctgctgctgcttgcagatagcctgctgtgtttaggatttagttaaatacatttctcctgtttaaaactaaatggtctttccttagtttgcttagttcttcagaagggcctttgaaacactgggaaataaacaagtgattctttagctactgctttctgaaatacttatataaaagctctgcactgtattctcccatccctctcaggggaatattagagggttaggactccccaggtagacattctaggggtgaaaatttgtcattacattgacatttcagatttaggttttcaacaatactgttttcttctttcacatattgccatctagtaatatagatgttctccgtccacattaatcaaaactattgacatggataattcctaattccttgaacactataatggagatctatagctagccttggcgtctagaagatgggtgttgagaagagggagtggacagatatttcctctggtcttaacttcatatcagcctcccctagacttccaaatatccatacctgctggttataattagtggtgttttcagcctctgattctgtcaccaggggttttagaatcataaatccagattgatcttgggagtgtaaaaaactgaggctctttagcttcttaggacagcacttcctgattttgttttcaacttctaatcctttgagtgtttttcattctgcagatgctgagtttgtgtgtgaacggacactgaaatattttctaggaattgcgggaggaaaatgggtagttagctatttctgtaagtataatactatttctcccctcctccctttaacacctcagaattgcatttttacacctaacgtttaacacctaaggtttttgctgatgctgagtctgagttaccaaaaggtctttaattgtaatactaaactacttttatctttaatatcactttgttcagataagctggtgatgctgggaaaatgggtctcttttataactaataggacctaatctgctcctagcaatgttagcatatgagctagggatttatttaatagtcggcaggaatccatgtgcagcaggcaaacttataatgtttaaattaaacatcaactctgtctccagaaggaaactgctgctacaagccttattaaagggctgtggctttagagggaaggacctctcctctgtcattcttcctgtgctcttttgtgaatcgctgacctctctatctccgtgaaaagagcacgttcttctgctgtatgtaacctgtcttttctatgatctctttaggggtgacccagtctattaaagaaagaaaaatgctgaatgaggtaagtacttgatgttacaaactaaccagagatattcattcagtcatatagttaaaaatgtatttgcttccttccatcaatgcaccactttccttaacaatgcacaaattttccatgataatgaggatcatcaagaattatgcaggcctgcactgtggctcatacctataatcccagcgctttgggaggctgaggcgcttggatcacctgatgtcgggagttcaagaccagcctgaccaacatggagaaaccccgtttctactaaaaatacaaaattagccgggcttggtggcacttgcctgtaattccagctactcgggaggctgaggcaggagaatcacttgaacctgggaggcgggggttgcagtgagctgagatcgcatcattgcactctaacctgggcaacaagagcaaaactccatcaaaagaaaaaaaaaatcgggtgcagtggctcatgcctgtaatcctaacactgtgggaggccaagacaggcagattgcctgagctcaggagttcgagatcagcctgggcaacatggtgaaaccctgtctctactaaaatacaaaaaattactcagcgtggtggcatgcgcctttagttccagctactcaggaggctgaggcaggagaatctcttgaacccgggaggtggaggttgcaatgagccaagatcgtgccactgcactccaacctggcaacagagcgagactccgtcttaaaaaaaaaaaaaattttgcagcgcaaaccaggatatcctctgttctcatttgttctagatttcaaaagaaacagtcctttctttggggaaaagagaaaggaaaaggagttttataaaaggaaagaaaagattcataagaacaagaagtgggcccacttgcatatacctttgtagaaaactgttcactgttgttgaagaaaagctcttcatattaatatgcagtccagatgcagtggctcacacttataatctcagccctttgggaggctgagacaggaagattacttgaggccaggagtttgaaaccagcctgggcaacatagtgagactctgtctccacaaaatttttttttaattagccgggcatggcagtgtgcttctgtagtcttagctactgaggaagctaagccagaagaatcacttgagcccaggagttcaaggctgcagtgagctatgatcataccattgcactcttgcacttgcacagagcaagaccctgtctcttaaaaaaaaaaaagtgtgtgtgtgcatatgcatatatacatatatatacatgcaaatgtatctgtttataattcagattgcttcaaaaagatgttgcactttatgatactgagaacagtgagaagtaaataagatagagtgtaggaggaggaataatttcagaacagccatctgagaacttctgtgacaacagatcaggcaaaatgaaatgtgaaagtaattttataggccaggcgtggtggctcatgcctataatcccagcactttgagtggccaaggcaggtggatcacttgaggtcaggagttcgagaccagcctggtcaacatggtgaaaccttgtctctactaaaaacacaaaaaaattagtcgagcgtggtggcatgtgcctgtaatcctagctgctggggaggctgaggcaggagaatcacttgaacccgggaggcggaggttgcagtgagcctagattgcaccactgcactccagcctgtgagacagaatgagaccctgtcttaaaaaaaaaaaaaaagtaattttataaactattgtgcacaattcgatgtattcataattaattaaatgattatttttgttggttttaacttttattcagtggctatttattgggagcctactgtgttctgggcactaggaatgcaacagtaaataagactaactaagtccctggtaggattcaggttctgtcgaggggagatacacaataaagatgaatttaagataacaataaatgctatggagaaatatacagaacagtggaatagtattagctgtcaaaggttgttgattactttcgtttaaggaggccagggaaagcctttctgaaaaaattgagctgagacctaaataacaagaaataattgtccttgaaaaatgaagggaatgcatcttataggcagaggaatagcaaacataaaggtcttgaggtaataatgagtgtggttttttgatttctgtattttggtttttttgagatggtgtctccctctatcccccaggctggagtgcagtggcacaatcttggctcactgcaaactctgtctcctgggttcaagcaattctcctgccttggcctcctgagtagctggtattacaggcacgcgtgctaccacacccgactagtttttatttttagtagagatggggttttaccacgttggtcaggctggtctcaaactcctgaactcaagtgatccaaccacctcaacctcccaaagtgctgggatcacaggcgtgagccaccatgcccggccagagcttggtttattttttaaaagataggccaatgttggtcgtgtgtggtggctcgtgcctataatcccagcactttgggaagccaaggcaggcaaatcacttgaggtcaggagttcgagaccagcctggccaacatggtgaaaccccatctctactaaaaatacaaaaaactagcatggtgtggtggtgtgtgcctgtaatcccagtgcctgtaatcccagctactccagaggctgaggcaggagaatcacttgaaccgaaaggtaggagttacagtgagccaagatcgcatcactgcactccagcctgaacgacagagcaagactcctgtctcaagaaataataatgataaaaggttcgggcacagtggctcacacctgtaattccagcactctaggaggccgaggcaggcagatcccctgaggtcaggagtttgagaccagcctggccaacgtggcaaaaccccatctctactaaaaaatgcaaaaattagctgggcacggctgggtgtggtggctcattcctgtaatcccagcactttgggaggtcaaggcggacagatcactgaggtagaaaccctgtctctactaaaaatacaaaaatttgcccagcgtggtggcgcgtgcctctaatcccagctacacgggaggctgagacaagagaatcacttcatcaacccgggaggtggaggttgtggtgagctgagatcgcaccattgcactccagcctgggcaacaagagtgaaactccatctcaaaaacaaaaaaaaattagctgggaatggtggcatgtgcctgtaatcacagctacttgggaggctggggcaggagaatcgcttgaacccaggaggcggagattgcagtgagctgagattgcgccactgcactccaggctgggcgaaagagcaagactccgtctcaaaaataataataataataataataggccagtgtagctggagtaatttgcaaattatgtgtggaggcagagattacacaaggaatgggagaaggtcatagatgagggccagatcacatagtatttggtggtaaggaattcagattttatccttgtggtaattggtggtgtggagatggttaaaaacaaggttggtttgggatgggtttgaagagaggacttgctaatggattaaatttggaggataaggtaaagagaaattgaaggagtgacacttgggttttggcttgaacaatagatcttgttagtaatattaaattagatgaagaaggcatggtagggaatatgggggagtgggaaaggcaggaagcaggaatggaaccaggaactctgttttagatgtgagaatttgttgttgttgttgttgttgttgttgttgttgttgttgttgttgtgacagcatctcgttctgttgcccaggctagagtgcatggagtgcggtagcacgatctcagctcactccaacctccgcctcccggttcaagtgattttcctgcctcagcctcccgagtagctgggattacaggcacctgccacaatgcctggctaatacttgtatttttagtagagatggggttttaccatgttggccaggctggtcttaaactcctgacctcaggtaatccacccacctcggcctcccaaagtgctgggattgcaggtgtgagccactgtgcccggccagatgcatgaattttgagatgtatactagacttctggatagagaagttaagtaggcagttggacacattgtatgaagctcaggggtacaaggaggactatgaacatgggagtcttctgacaaatttatcactagactcctcattcaagtaactaggaaatgtcagatattcttcccctagtaatagccagtggttatactcttgcctttagttttcttcacaatactcttggcaacacataaggccttccctacaatctgagtttcagtcagaattgtttctgagcgttcttcctcaaatttctccccagtctcattattctttattctcatgtccatgaccagtcataatagtaattatgaaaaacctctaactttctttagtgcattgaatgtatattttatcattttggttgtgttaactgtaaatctctcagtggaaatctgaaaagcctttatttccttagatgataatatacaattgatttaggagatagggaatttttcagttacctttataacagcacagtattagcagtctaatctaaatgctaagtgaatgttttgagaggagatagatgttgaaaattaaaatacattaagtcccagtgaggtgaaaagccgattgttaagttctgcacacaaaagatttgcttcagtgaattgatttcaacagctgagatcctagtcatttcacctggtctaccaaaaagaatgattttacttgcttttggtcaaatctctgcccagcaattctttttctttctttcttttttttgttttatgtgtgtgtgtgtgtgtgtttttttttagcagagtctcactttgtcacccaggcgggagtgtggtggtatgatcacagttcactgcagcctccaactcctgggctcaagtgatcctccagcttcagcttttcaagaaattgggactgcaggcacatgcaactatgcctggctgaggttttatgtatcttttttctagagaaggggtctcactgtgttgcccagctgggtctccagctcctggtctcaagctgtcctcctgcctcagcctcccaaagtgccaaagtgctagggttataggtgtgagccattggtgcccagctactgcctgcctggcaattctgaatgccttaaattttttttttttttttttttttttttgagacagagtttcactctgtcacccaggctggagtgcagtggcatgatcgtggctcacagcaacctctgcctcctggattccagcaattctcatgcctcagcttcccgagtagctgggactacaggtgcatgccaccacgcccagctaatttttggtttttttgtttgtttgtttgtttgttttgagacggagtctcgctcagttgcccaggctggagtgcagtggcgtgatctccgctcactgcaagctccgcctcccgggttcacgccattctcctgcctcagcctcccgagtagctgggactacaggcgcctgccactacacccggctaatttttttgtattttaagtagagacggggtttcaccgtgttagccaggatggtctcgatctcctgacctcgtgatccgcctgtctcggcctcccaaagtcctgggattacaggcgtgagccaccacacccggcctaatttttttttttttaattttatttttaattttttgagatgcgagatggagtctcgctctgttacccaggctggagtgcagtggcaccatctcagctcactgcaacctccacctcctgcattcaaaagattctcctgcctcagcctcccaagtagctgggattacaggtgcctgccaccacgcccaactaattttttgtatttttagtagagatgaggtttcaccatgttggtcagactggtgtcgaactcctgacctcaagtgatctgcctgcctcagtctcccaaagtgctaggattacaggggtgagccactgcgcctggcctgaatgccttaaatatgacgtgtctgctccacttccattgaaggaagcttctctttctcttatcctgatgggttgtgtttggtttctttcagcatgattttgaagtcagaggagatgtggtcaatggaagaaaccaccaaggtccaaagcgagcaagagaatcccaggacagaaaggtaaagctccctccctcaagttgacaaaaatctcaccccaccactctgtattccactcccctttgcagagatgggccgcttcattttgtaagacttattacatacatacacagtgctagatactttcacacaggttcttttttcactcttccatcccaaccacataaataagtattgtctctactttatgaatgataaaactaagagatttagagaggctgtgtaatttggattcccgtctcgggttcagatcttagctgataagtggaagagctgggactttaagcagatgagaatctaaagactttgctcttttcacttcactggggtgtctttctctctctctctcttgctctctctctctctttttttttttcccaagacggagtctcactccattgcccaggccagagtgcagtggtgcgatctcagctcactgaaaactcatcttgcccaggctggtcttgaacccctgaccttgtgatcctcccgccttggcctccccaagtgctgggataggcgtgagccaccgtgcccagccaataatagctaaaatttatataatgttcactgggccaggcacagcggctcgttcctgttatcccagcactttgggaagctgaggcaggcagatcgcttgagccaaggagttcgataccagcctgggcaacatggcaaaaccccatctctaccaaaaaaaatatacaaaaattagccaggcgtggtggcatgtacttgtagttccagctactcggaaggctgagttgagagtatctcttgagcccaagaagaggggactacagtgaacggagattgcgccactgcactccagcctagacgacagacagaagatctcaaaagaaaaaaaaaaaaaaaagatcactttatgctgggactgctctaaaggcccaaccatgttttaactaattaacaattttatgacaactctatgagctatgtactgtaattatgcctatattacagatgtgaaaattgaggctcagagaggttgaataagttgctcaaagtcacacaggtaataagtgatggaactagaagttgaactcaggaagtctagctccaagtctaaattctttgttaatttatttttcgggccagagtcttactctgtcacccaggctggagtgcagtgccactatctctgctcactgcaaccttcacctcccaagttcaaaccttgttcaattcttgtgccttggcctcccaagtggctaggattacaggcatgtgccacaacaactagctaattttttgtctgattctgttggccagtctggagtgcagtggcgcaatctcagctcactgcagtctccagctcccaggttcaagtgattctcgtgccttagcctcccaaatagctgggattacaggcacgtgccaccacaccgagatagttttttgtatttttaatagaaacaaggtttcaacatgttggccaggctggtctcaaattccagacctcagatcatctgcccgcctcaggctcccaaagtgctgggattacaggcatgagccactgcacccggccttaatttttatatttttattagagatggggttttgccatgttggccaggctggccttgatctcctggcctccagtgatccacccgccttggcttcccaaagtgctgggattacaagcatgagccactgcacccggcctccaattctaaactcttaacaacaatactatagtttcttgaaaagttgttgaaggcttcacggagggaaaaaaaatggagcattctaacaactttgcagatgagacccaagaagactcaatgactttctcctgatcatattgtagcagatgacttagccagaactctgacttcctcacagggagaaagtctgcaagatttcacacttacctgtcaggcctgagctggctgctttctcagctccctaagtgctatgttcccagtctgcttttcttcctttttcaagtgtgcactaccaggcatttcagaacatcccaggctggtcgcggtggctcacacctgtgatcccagcactttgggagcccaaggcgggtggatcacctgaggtcaggagttcgagaccagcctggccaacatggtgaaaccccatctctactaaaaatacaaaagttaactgggcgtggtggtaggcacctgtaatcctagctcaggattactcgggaggctgaggctagagaatcggttgaacccaggaggcggaggttgcagtgagccaagattgcgccactgcactctagcctggggacaagagggagacttcatctcaaaaaaaaaaaaaaaatcccagctgggcacagcggctcacttctgtaatcccagcactttaggaggccaaggcaggaggatcacttgagcccaggagttcaagactagcctgggcaacatagtaagaccctgtctctacaaaaaaatttaaaaattaattgggtgtcgtagcacactcttgtattcccagctactcaggaggctgaggtgagaagaatgcttgagtctgggaggtcgaggctgcagtgagccatgatggtgctactgcactccagcctggccaacattgtgagaccttgtctcaaaacaaaacaaaacatccttctactgagcactttctgtccctttatagaaacttaagagggaaccagtagaggtaatttcctaaggaaaactgctttgggacatgatcacaaatgaagcctggagttttgaactgctgaggtcagcctgtttttaccttctgagcctatcaagtaattgttccagatgccaagaaaagctgctggccttatttctgcttctgcctttaccacaggggagcgccatgtgagccagtcctctgtttttcctccactgtatgctaggcagtattagcaccagattcttcccctctttaaaaagaaattctagtgctttggattttttcctccatgcagaatagcaatgatggaaagtatgtggtcaaagtaatgacattctgaaaatactaaatgtcaccatagtatttttctctggaagagaaatgtatatgtagaggtgaaacttcaaatttctttttttttttttttaagacgaagctttgctcttcttgcccaggctgaagtacaatggcgtgatcttggctcaccgcaatctctgcctccagggttcaagtgattctcctgcctcagcctcctaagtagctaggattacaggcatgtgccaccacgcccagctgattttgtatttttagtagagatggggtttctccatgttggtcacgctggtcttgaactcccgaccccaagtgatccacccacctcggcctcccaaagtgctaggattacaggccaccgcgcccggcctgaaacttcaaatttctttttttttttgagacagagtctcgctatgtcacccaggctggagtgcagtggcgccgtctcggctcactaccagctccactccacctcctgggttcacaccattctcctgcctcagcctcccaagtagctgggactacaggtgcccgccaccatgcccagctaattttttgtatttttagtagagacgggttttcactgtgttagacgggatggtctccatctcttgacctcgtgatccgcctgcctcagcctcccaaagtgctgggattacaggcgtgagccactacgccaagcccgaaacttcaaatttcttatctcataactaggcatccttatcactgagtgttagcctggatataaacattcctaatcttttgtacttttcatgtcagcatttggctccacttggctgcctggggagaacttctagcattatgagcatgcaggtcctatcaacaggttgggggtgcggtttattcatacaggtagtgagagtggcacagatggatgctgtcccttaaaacaaacagacttgtctttgggagcctgaggcgggtggatcatgaggtcaggagttcaagaccagcctggccaacatagtgaaaccccgtttctactaaaaatacaaaaaattagccgggtgtggtggtgtgcacctgtaatcccagctactagggaggctgaggcaggagaatcacttgaacccaggaggtggaggttgcagtgagccgagatggcaccattgcactccagcccaggcgacagtgcaagactgcgtctcaaaaaaaaaaaaaaaacacacagacttgtcctactgccatttcttttcactctggcggtaaagtaagagtgtgtgtgtgtgtgtgtgtgtgtgtgtgtgtgtgtgtgtgtgtgtgtgtttctgtccgtctgtctgtcaagggggagggtgaccactttctaaaaggccatccgtgtatttttagcttcctgatttttttctctatcgcagtctctttgaagccaggtgaattttaggccttggcaattttctttttattgcaatgggaaggtcaagacactgagagtcacccaaaacatatccatccaaaatgatacaattttagggtttatttttaagtgatacccaagttatttgctaagaacctatgccagtgtgtttatgagaatttgcactgtcccacactgttgccaccagccacatgggactgtttaaatttaaattttacaaattagccagtcatggtggtgtgcacttgtagtcccagctacttaggaggctgaggcaagaggattgcttgagcccagaagttcaatactgcagcaagctatgatcgtgccactgtactccagcctgagtgacagaatgagacctcatctcttcaaaaaaaaagaaaaaaattaaaatatgaagtttagttcttcattcaccctaaccacatctccagtgctcaataactatatgtgactcatggctaccttattagcatagatatagaacattgtgactatcacagaaagttgttttgaacagtgttgccaagccctgtaagtggaagaggcagtgcagtgtgatctgtgtcttcaggaaaccaggtagtcagactagttcaatgaggagaggcagaacctggcttcacttctagattaaaaactgcttaggtggcctaaagatacaatggccattctcagagtagtgagaaggaaggaacagatgtttagggggctagaagaaagtcagagagggccgggcgcagtggcttatgcctgtaatcccagcactttggaaggccaagacaggcagatcacgaggtcaggagttcgagaccagcctgaccaacatggtgaaaccctgtctctactaaaaatacaaaaattagccgggcgtggtggtgcgcgcctgtaatcccagctactcaggaggctaaggcaggagaatcgcttgaaccctggaggcagaggttgcagtgagcccagatcgcaccactacgctccagcctaggtgacagagagagactccgtctcaaaaaaaaaaaaaaaagtcagaggagacaaggagcatgtacacctaaaatcaacatagacccctctgttgatggggtcatagtgagtacttgaggtaccaagtctggataaacatcaaacttcagccaataactttgagtttctagccatccaagcctcttattaaacatacagaaggaccttttttcccttgcatctaacaagttaaagcacctgcagagatcattagggaggagccttggcctgattggtgacaaaagtgagatgctcagtccttgaatgacaaagaatgcctgtagagtgcaggtcaactacatatgcacttcaagaagatcttctgaaatccagtagtgttctggacattggactgcttgtccctgggaagtagcagcagaaatcatcaggtggtgaacagaagaaaaagaaaagctcttcctttttgaaagtctgttttttgaataaaagccaatattcttttataactagattttccttctctccattcccctgtccctctctcttcctctcttcttccagatcttcagggggctagaaatctgttgctatgggcccttcaccaacatgcccacaggtaagagcctgggagaaccccagagttccagcaccagcctttgtcttacatagtggagtattataagcaagatcccacgatgggggttcctcagattgctgaaatgttctagaggctattctatttctctaccactctccaaacaaaacagcacctaaatgttatcctatggcaaaaaaaaactataccttgtcccccttctcaagagcatgaaggtggttaatagttaggattcagtatgttatgtgttcagatggcgttgagctgctgttagtgccaacatgttagtgagaaaatatctttggataggtaaaaatcaaggaggagttctcctcttcctaaaccatcttaatttacttacatagaagaaagcacagcagctggcccaccacggacgggcccagagcaggggaagattctcggtgaacatttctttttttttttctttttttttgaggtcgagtctctgttgcccaggccagagtgcaatggcgcgatctcggctcactgcaacctccacctcccgggttcaagtgattctcctgcctcagcctcccaaatagctgagactacaggcgtgtgccaccacgcccgactaattttttgtattttttttttagtagagacggggtttcaccgtgttagccaatatggtcccgatctcctgacctcgtgatccacccgcctcagcctcccaaagtgctaggattacaggcatgagccactgtgcccagccctctccatgaacattttctaattaaacttgacacttaatacaatgttatgcttaggactgctataaagcttacctctggagttgcgcagcacaaaggccttggtgtgtgtataaatttggtttgttcttttcacagcaaaagctacccacctttgcctcctgtgcctgcttctgcccagggacttaggtcctcttacaccttagagaaaggccttagcatctggtcacaggcagatgagtgacagcaagaaaacctggctgcaatgtaattttgtttccatcctctttattagttatcaattggatttttatgaaatttccaagttccactcaaggatttctcagtgtttttttactttggtatagtggaaaccagggttgccagaaagtattattttgggggtgagttagtcaaccttcgttcagtcagacagacaggagcacctcagcaattcccagaaacgggctgatgggaaagagcaacatacatgaatgtcttgaagaacacagccaacagagcccattgggcagttctgattttccaggtacacagcatctccacagtctcttctgatttttattcccctgagtatatggattccagctcagcatgtagcctttccctgctgagtctctaaccaggataacatgtatttttttgactggatgaattatcttcccatctcttgacatttacagtaattaccaccaagtatggtattttcagtggccgtgattatcagttaccaacacagaattaggatgaagggaggaagggagggaaggaaggtgggtgttttttcacacagtgtcttagccagcaatttagcaaattaatggaaattagatctttgatttttttttctttcaagcattttatttgagagactatcaaaccttataccaagtggccttatggagactgataaccagagtacatggcatatcagtggcaaattgacttaaaatccatacccctactattttaagaccattgtcctttggagcagagagacagactctcccattgagaggtcttgctataagccttcatccggagagtgtagggtagagggcctgggttaagtatgcagattactgcagtgattttacatctaaatgtccattttagatcaactggaatggatggtacagctgtgtggtgcttctgtggtgaaggagctttcatcattcacccttggcacagtaagtattgggtgccctgtcagagagggaggacacaatattctctcctgtgagcaagactggcacctgtcagtccctatggatgcccctactgtagcctcagaagtcttctctgcccacatacctgtgccaaaagactccatctgtaagggatgggtaaggatttgagaactgcacatattaaatatactgagggaagactttttccctctaactctttttcccatatgtccctccccctcctctctgtgactgccccagcatactgtgtttcaacaaatcatcaagaaatgatgggctggaggctgggcatggtggctcatgtctgtaatcccagcactttgggaggccgaggcaggtggatcacttgtcaggagtttgagaccagcctggccaacatggtgaaaccccatctgtactaaaaaaaaaaaaacaaaaagtagccaggcctggtggagcatgcctgtaatgccagctatttgggaagttgaggtgtgagcatcgcttgaacgtgggaggcagaggttgcagtgagccaagattgcaccactgcactccagactgggtgacagagtgagactttgtctaaaaaaaaaaaaaaagagagagagagaaaagctaggtgcggtggctcacgcctgtaatcccagcactttgggaggctgaggtgggcagatcacgaggtcaagagatcgagaccatcctggccaaccaacatggcgaaaccccgtctctactaaaaatacaaaaattagctgggcgtaggggcgcacgcctgtagtcccagctacttgaggggctggggcaggagaatcgcttgaaccccggaggcggaggttgcagttagccaagatcgcgccactgcactccagcccgggcgacagagcgagactccgtctcaaaaaaaaagagagagagagaaatgatgggctgggccagtgccccacccctgtaatcacaacactgggaggccaaggtgggagaatcgcttgagcctgggagctgaagaccagcctgggcaatacagtaggacctcatgtctacaaaaaaattattaaaaattagccaaggctgggtgcggtggctcatgcctataatcccgggggtgaagttgagcccaggagtttgagaccagcctgggcaacatggcaaaaccctgtctctaccaaaaatacaaaaaaattagccaggggtggtggtacgtgtctgtagttccagctacttaggaggctgagatggaaggattgcttgagcccaggaggcagaggtggcagtgagctgagatcacaccactgcactccagcctgggtgacagagcaagaccctgtctcaaaaacaaacaaaaaaaatgatgaagtgacagttccagtagtcctactttgacactttgaatgctctttccttcctggggatccagggtgtccacccaattgtggttgtgcagccagatgcctggacagaggacaatggcttccatggtaaggtgcctgcatgtacctgtgctatatggggtccttttgcatgggtttggtttatcactcattacctggtgcttgagtagcacagttcttggcacattttaaatatttgttgaatgaatggctaaaatgtctttttgatgtttttattgttatttgttttatattgtaaaagtaatacatgaactgtttccatggggtgggagtaagatatgaatgttcatcacaaaaacataaatcaaggccgggcatggtggctcatgcctataattccagcactttgggaggtcaagatggaggtcaaggtgggagcctagaagttcgagaccagcctgggcaacataaggagacttcatctgtacaacaaatttaaaaagtagctgggtgtggtggcagatgcctgtagtcgcagctacttgggaagctgaggtgggaggatcacttgagctcaggaggttgatgcttcagtgagccacgatcacaccactgtactccagcctgggcgacagagcgagaccgtgtctcaaaaagaaaaaagaaagtataaatttacacaaaaacaataaaataatcccagtaattccaccacttggagatgatcaccataaaactccaccaggcatatgtgcgtatatatacacgtgtattttataaaatgtgatcataattacactgttttgcttttttccttaagatattacatacatttttccacatcgttaaattacagtgctgttttcctggtggctttcctttaacagattgaagttcatgttaatacagttgccagaggctgtgggctttcactgtcaccaggagtcactcctagggcctcttcagagcaaggccttatgtcctgaagcattgccttttttttttttttttgaggtggagtctcactctgtcacttagcaggctggagtgcagtggcccagtcttggctcactgcaacctccgcctcctgggtttaaatgattctcctgcctcagcctcagggcggatcacctgacatcaggagtttgagaccagcctggccaatatggcgaaaccccatctctactaaaaatactaaaaaaaattagccaggcatggtggcacgcacttgtagtcccagctacttgggagactgaggcaggagaatcgcttgaacccaggatgttgaggttgcagtgagctgagatcacaccatcacaatccagcctgagtgacagagtgagactccatctgaaaaaaaagaaaaaacaattagcctggcatggtggcaggcacctgtaatccctgctacttgggaggctgaggcaggagaattgcttgaacccgggaggtggaggttgcagtgagctgagatcgtgccattgcattccaggctgagcaacaagagcaagactccgtctcaaaaaaaaaaaaaaaaaaaaaaaaaggccaggtgcagtggctcacgcctgtaatcccagcactttgggaggccaaggtgggtggatcacctgaggtcaggagttccagagcagcctggccaacattgtgaaacccccgtctctactaaaaatacaaaaattagctgggtgtgatggcatgtgcctgtaattccagctactcaggaggcagagacaggagaattgcttgaacccaggaggcggaggttgaatgagccgagattgcgccatcacactctagcctcggcgacagagcaagactccgtctcaaaaaaaaaaaaaaaaaaattagcttctacctcattaatcctaagaactcatacaaccaggaccctggagtcgattgattagagcctagtccaggagaatgaattgacactaatctctgcttgtgttctctgtctccagcaattgggcagatgtgtgaggcacctgtggtgacccgagagtgggtgttggacagtgtagcactctaccagtgccaggagctggacacctacctgataccccagatcccccacagccactactgactgcagccagccacaggtacagagccacaggaccccaagaatgagcttacaaagtggcctttccaggccctgggagctcctctcactcttcagtccttctactgtcctggctactaaatattttatgtacatcagcctgaaaaggacttctggctatgcaagggtcccttaaagattttctgcttgaagtctcccttggaaatctgccatgagcacaaaattatggtaatttttcacctgagaagattttaaaaccatttaaacgccaccaattgagcaagatgctgattcattatttatcagccctattctttctattcaggctgttgttggcttagggctggaagcacagagtggcttggcctcaagagaatagctggtttccctaagtttacttctctaaaaccctgtgttcacaaaggcagagagtcagacccttcaatggaaggagagtgcttgggatcgattatgtgacttaaagtcagaatagtccttgggcagttctcaaatgttggagtggaacattggggaggaaattctgaggcaggtattagaaatgaaaaggaaacttgaaacctgggcatggtggctcacgcctgtaatcccagcactttgggaggccaaggtgggcagatcactggaggtcaggagttcgaaaccagcctggccaacatggtgaaaccccatctctactaaaaatacagaaattagccggtcatggtggtggacacctgtaatcccagctactcaggtggctaaggcaggagaatcacttcagcccgggaggtggaggttgcagtgagccaagatcataccacggcactccagcctgggtgacagtgagactgtggctcaaaaaaaaaaaaaaaaaaggaaaatgaaactaggaaaggtttcttaaagtctgagatatatttgctagatttctaaagaatgtgttctaaaacagcagaagattttcaagaaccggtttccaaagacagtcttctaattcctcattagtaataagtaaaatgtttattgttgtagctctggtatataatccattcctcttaaaatataagacctctggcatgaatatttcatatctataaaatgacagatcccaccaggaaggaagctgttgctttctttgaggtgatttttttcctttgctccctgttgctgaaaccatacagcttcataaataattttgcttgctgaaggaagaaaaagtgtttttcataaacccattatccaggactgtttatagctgttggaaggactaggtcttccctagcccccccagtgtgcaagggcagtgaagacttgattgtacaaaatacgttttgtaaatgttgtgctgttaacactgcaaataaacttggtagcaaacacttccaccatgaatgactgttcttgagacttaggccagccgactttctcagagccttttcactgtgcttcagtctcccactctgtaaaatgggggtaatgatagtatctacctcctaggatttattgaggcagcttaaataccttttgtatttcctgttgctgccaaaacaaattgttgcaaggtcagaagtctgaggtggctcaactgtttctttgtttcaggtttcatgaggccaaaataaaggtgttcgcagggcgtgttcccttctagaggctctgggtccttgcagttctaggactaagatccctgtttcccactggctgttggctgggcatcattctcagcttcttgaggctccccacattcctaggctcctggcctgtctgcctccatcttcaaaaccagcaatgggtggtcaagtttttctcacactgaatcttgctgactactgtatctttctaactcctgccagagacatttctctgtttctaagggctcaagtgattagattgcacccacttggtaatccaaagtgatcttcatatcttaaggcccatagccttaattatagctgcaaagtcccttcgcagcagtacctagattactgttggaatgaataaccagaagacagcaatcaagggaggacatctttagaattctgcctaccacttgtatttaacatgcttaatccacagatgacactctctaccattatttcctggtcctcacactgctcagagattggaatcctttttaagcaaagagaatgaagtcatcacatagttcagtcctgctgtatttgctggaaacagtgaaggaagatagagaaaatggagctaactgccaatattaccattttataatcagtcctcaatcatagccctatgaagtgggtatttgttacctcattggaaaaatgggagttgaatctcaagttccttgtttgtaagattttactcagatttgcacagctaaaaatgactacatggagacccaaagccacctttctgttcccatcatcagctttccatctgcctctgtcactgaccccgggacagaaggttcaagccttaagggaatttggagagagaactagattttgaggggaactcacactcacttcccttttgggccacagtaggagacagtaaaagcagccccatgtcaggcaaagggtcttacaggagtggatcatggctgctgtttccacttctctctggcttcccagcttatgactgtgtatcttagttgtcaaagccttccagttcatcctcacctacagcttgacttcccaagggcccatgccagctccctgtctacctgccagtgagttgatgagtctcggtgttagtagtaaaggcaggcgggaagcaagcagaagtgctactgggccttgagggtaagccaggcctcagccttctgaccccatcactaatgggttaataggaaaagcagtatccatctagtacagcctgccttttcaggaatagtgagtaaaagcaaagatgactaaaatacattaaagttttctgtaattgtctctaaggtctcccaacaaacatataccccatctgtttcaagctctgcataacctttcccagaagtcaagttcaggccctggcctcatggtgcctggcccaggttaagagtgctacctgatgatggagttaatacacgttgctttgacctctgactttaagatgtcctcccacttttccaccccgcaatctctagccctctctgggcacagcagcaattgggaactagttcctgtactgcctttatctcattttacaaaacaaacttctacaaagaagctggaaaggaaggaggagaaaggattatcatgcaggcacagggagggggcctagagaagagctctggcagattatgtccctcttaaaaaatgcaaccagaatcatcaacaaagtatcacctcaaaaatatgcaggagaaaaagaaaggaatcaatgttggggtggttggagcagaaggagccaaactgcccagaaggtgtcctctgaaggctgcgaggagcagactaggtcagccccagaggcagatggcacacacagaatggcaggattaccggtagctgcagatttattgacagaagccctagagactgggcctgctgcccagggaatgtgggggctcacttatcaaagactactggaaaatggctgagccggcaaccccttccactacagtgatgcctggttttcttgcacagcctgtaactctgcctgtaacaaggagaaaattaaagcaacgaatctggccaaatagaaaattaaggaaaactagaaacagctcctatggagagcagggattggggaggtgtagaggggctgatcctgaatgtctggaggatcaggaaaatgtaagcaattgtttaagggactggtaggaatcaagatctggagagagatcctcccgactctggtggctggggaatatgaactgtggagacatggtttcaaggactcaaaatgatatgacagcttaacatttacagttcagtgcagaggctctcaaagcatgatcccctgataggagtgtgagggggcaacaccatcacctaggaatttgttagatatgcaaattcccagacccactgaatcccagacaggtggggccagcaacctgtgaatctacaacaggctcaagtttgagaacaaatgacttagtgtaaggggctgctaattgatataaaatgttacctgtggtctattattttgtctgtagtgaatattgggcttgttaaggataaataaggtttgtgggctggtaagtggttcttctctacaaggttgcaacagctggcttcagttaacttcaaaaaggccctttaagcaaagacagtagtccccccactcatccatggttttgatttcagttacttatggtcaaccatggtccaaaaatattaaaaggaaaattccggaaaccagtcactcgttttaaattgtacaccattctaagtattgtttgacttgttctattttattattagttattgttgttaatctcttactgtgcccaatttataaattaaattttatcataggtatgtatgtatagggaaaaacataatatatatagggtttggtactatccgagggttcaggcatctacttgtggtcttggaacatatgccccgcagataaggggggactgctgtacaatgcaaaggacaaagattaaattatattagcaatctaggagcagaagggcaagactgcttttttaaaaaacagctaaaggtttaggaggttttattaatatttaaattgtattgaaaccacagctgcagcctttgactccagcatagagatatgcaaatatggctttcaaaagaaaggcaatttcagacagccctcaaagtaacaggaacaaataaaacaaatgattttgtaatttatctttattgactgatgttgcacaaggcacaggccataccctgtgagagtcagcaacagccgagctctctgaggagagaagagaaagccaggctggagggagaggcaggccgacccatagacaggtgacaggaaagacacagagcaggcagatgggagaagaagacaactaaattaaaagggaaggaaaataaaaacccagccctgggtcctgtagaccatctgatcttgctggctctcagcagcaacaacaataatcattaatgactatcatttgccacactactactaagtgccatgcactattcctcacatacaaatgaggaaaatgaagctttgagaggtcaagcaacttacccaaggtcacacaacaaaaggaaggggcagagcccagattcaaagatttgtgtgaggctgaagccctgtgctctttccagtgcattatgctgggaaccagtcctgggaggcagtgaataacaataaggttaatgggccgggcgcagtggctcatgcctgtaatcccagcactttgggaggcggaggcgggcaaatcacgaggtcaggagatcgagaccatcctggctaacatggtgaaaccctgtctctactaaaaatacaaaaaattagccgggcgtggtgtcgggcacctgtagtcccagctactcaggaggctgaggcaggagaatggcatgaacctgggaggcagagcttgcggtgagccacgatcgcgccactgcactccaacctgggtgacacagtgagactccgtctcaaaagaaaaaacaaaacaaaacaataaggttaatgattgaggggacactttgtgcccagttctgtggtattctgtatgggcatgcgtgtgtctgtgtgtgtgtatatgtatgtaactgtggaaaagagggtgaaaacctccatttctgaccttcaaattggttactatccaatgagtaaggcaagaaaagaaagccaaagaaaacttgcagaattctggtgtaaaagttcttttggggccgtgtggtggggccagctctgcctgttgtggaagacttctggtggaggcatctcagctggccttggccttgagtaaaatttagccagatgaaaaggaaagctggagattacacaggcccaggtgagagcctccagctgctagaattggaggaaggagcacctgattcagagagatgagaaaaggcaagagaatcctgaaaggatacatatctctgaccctttgtccccatccaatctccccagaccttccatcccaagcccaaacacaaccttacctgctgctccttttcaggcaccctggccaccaaatataggaacccataaattttgctcatactctatgttctactaggcaagtcctgatctgtcatctctacaggccccaatccttcccgctcacccctacagagccttctccaggttttctaggccagaatctctccccacttagaatactccagaagttttgctttatttgtgagactttattcaattgaagttacttgtgtgcatatgttatcctctctatttgactagaaggtccttataatcccttatgaccataattattttatctttgatataacccagctctgtaactagcagatactttgttaggcatccagtgggtttttcctaaatgaatgaagtaaaggatgaatgaatggactcagtgcattgaagggcttatccaactattggttccactctcaagacctttggaaaactagccatgttctggaatgctaattcccttcaatgcctttcgcccatttttctatgaccctgatttactccaaaaacaatataagggatctaagtgtccaagaatgactccttctaaacccacacctaaggattttctctctttttgtgtgtgtgtgtgtgagacagagtttcactcttattgcccaggctggagtgcaatggtgcgatctcagctcactgcaacctccgcctccagggttcaagtgattctccctgtctcaccctcccgagtagctgagattacaggcgcctgccatcacacccagctaatttttgtatttttagtagagacagggttcaccacgttggccaggctggtctcgaactcctgtcctcaggtgatccacccaccttggcctcccaaagtgctgggattacaagcatgagccaccacacccggcctctttgattctcttttgcctatcatgaagtctacccctttgtaattaattagaccaatgtccacccagacagaataacattttcccctatccatcagcgaggtcttctccgtgatggacattcaaggcagacagagagactgctgctgcaataactggggaaataattatggtgttcatgatgatttctttgcaggttcaaagcactagcccagccattatctctcccacttcactaggataaaattgctaaccccactttataggtgctaaaacaggtccagggccttgtcaaaggtcactcagtgagctggtggcagacctggaaataactagcctaggagtctcgatattcattaggccacagatggaaatgccctcattatgctgtctgggctatgtctgagagagagtcaactaactggactccagttaaatggagatatgcactggaagataagtttgtgactacagagtgtttttctctgcaatgctgcagcagttggcactggttaattccagagggtgtgtgtgtgtgtttgtgtgtgtgtgtgtgtgtgtgtgtgtgtgtttaaagcattatcacgcgtcctagatgagggaagagagggtgaatccaaggtaacacagacacacaggtaagcagatgtttgccatcttctcttgaaagtcatataaaaccaaatgacagtgtatattagcaggagaaactcaggaggctcttcccagctgttaggctatacgactctggaataagctagtacaaattaggtagaaagtctaggattgttcctagagcctggtggcgggaggtctttcctggaggcaaaggactgtggggctgtctcagggccttctgcagctgctaaagtgagaagcctgccgacgggatcatccccaagcccacagaagctctgaaagctatggaaaccaagatctgtacaggagccacttctggtttctaatgcctgagagattaaaatggaaaaaaaaattcccatggaaattcaagaatgcaagaatgttctggggccaggcacggtggctcatgcctgtaatcccagcacttttggaaggccgatcacctaagatcagaagttcaagaccagcctggtcaacatggtgaaaccccgtctctattaaaaatagaaaattagctgggcgtggtggtgtgcacctgtaatcccagctactcaggaggctgaggccagagaatcacttgaaccctggagccagaggttgcagcgagctgagatcatgccattgcactccagcccaggcaacaagagcaaaactccatctcaaaaaaaaaaaaaaaagttctacaacgtggccacaggtccgttctggctaaggcagtgatgtccccctcccaccaaagcccaaaccttctaacatcatcctaaagtgtgggaatcacctcttcacctcaggccagctctgggcttttctcagcctattcatcagcctccattagtcctcagctctgctgaggcctcagcagcttcccagtcccactgaaggctgtggggcatagaatgggcagagggcaggccgggcgtggtggctcaagcctgtaatcccagcactttgggaggccgaggcgggcagatcacgaggtcaggagatcgagaccatcctggctaacacggtgaaccccatctctactaaaaatacaaaaaattagccaggcgtggtggcaggtgcctgtagtcccagctacttggtaggctgaggcaggagaatggcatgaacccgggaggcggagcttgcagtgagccaagatcctgccactgcactccagcctgggcgacagagcaaaactccgtctcaaaaaaaaaaaaaaaaagaaagaatgggcagagggcataaaacctgagtccagaggtggtggttgcacaacattgtgaatgcactaaatgcccctgaattgtacattttaaaatggctaattgtatgttatgtgaatttcaatcgatttttaaaaaaaataaaactgagccacctttggggtggggagaggagctgggccaggctctgaggatttgagggttgaaactccttgcagggagtgaaatgaacgacaatggggaggccagtctggccctcccaactcctcctccaggaccagatgggaactggggctagggagaaaggcccaactggggcggcgccgggctctgggcagaagagaagcactcagtgaatgtgaggaggctgcagccgtcggctcatttgcatcataagtgattggttttccctgctcgtccctcatcaggacacaatggacagttgtttgctggcgcagcagatccatttaccaagggagagaggagacagagcacaagtgaccgatgggtaatagtgttgaagggtgggcagccgcctcccctcccctgtgctcccaggccactgggactcttgttctcacacaatgagaagggaccttagagagcaaatcaccgcttcactttatagaagaagagactgaggtgctgagaggaggtgagccttgctgtggtcaaacagcaagaacatagcaaaactaagcattttaaactctaacctctggatcctttttctttgagacaaggtctcgctctgtcacccaggctggagtagtacagtggcacaatctcagctcactgcaacctctacctcccaggctcaagtgatccccccacctcaactttctgtgggccacgacacctggctaattttttgtagagacaaggtctcactgtgttgcccacatttttctcgaactcctgggctcaagtgatcctccagccttggcctcccaaagtgctaggattacaggtgtgagccacagcactgggcctgtttggtttttgttttgttttgtttttttgagatagggttccactctgtcatccaggctagagtgcagtggtatgatcactgctcactacagcctcacactcctggttcaagtgatcctcccacctcagcctcctgagtagctaggactataagtatgtgccaccacgcttagctaatttttatttcttttattttttctagaaacagtgtttccctatgttgcccaggctggtctcacctgggttcaagtgatcctcccacctcagcctcctgaatagctgggattacaagtgtgagccactgcaccaggcctggattctaaactgtcatttgagggttcacttcgtttccccataataccttctctgtgcccttattcccatctctgtggtctcctgttcccggggccttcgtttccatcattctgtctcctgggtctatttctttttctctgtttctgttcctctctgtatcttttcctcttggtttccaggcagctaggataattactagacttttaattaacccctgccctaacaaaggtgggtctggcatgaggcagcaatttagcaagtgtcttggtttgttttggggataggtggggagagaaaaatatgtgttggggcctattataaaccaggcactaagacagacacataatgcactttatctcatttcatcctttcaatcttgcaaggtaggtgttcttagagacaaaaagggtgaggctcagagaggttaagtaacttgtgcaagggcacccagctagcaaattgtagttacctgactccaaaacctctgttcttccatctcacaccctggcacagggtctaactcagggtaaggggctcattgatttcaggcgcaagggaggcacaaagtcactgaaggagaccactgttttgttgctgtcctctaggcagcgactgcgtccccccagagccccctccttctctgagccccttctgcagcgtggcgaaatctcacaaatgcaagcttttgcccccagggaggtggggaggcagtgatcaagaaagaaacctgacaaacccagaccaaccatgggggtctccctcctgttaacacccctccctaacagccctcctggtggttccctgtctgcccctcccctttatgggtcaagcctgctggcgtctgtttcattgtgctgtgggggaaggggagagtcaggggtgagtgggtgtctgtgtgcatgaacataaggcctccgggttcattctgacactgaatgaaaaactcaccaattattcgtccagtctcattaatatgcagacagacatctgttatttaggagtcaacagcagaggcattttcttgtcgggaggggcactagtgtacagggctctcttgtctctccgctgctagcgggtagctactcaggaatcatcccacacctcccgacctggagcctcccctctctctgaccctcactcacagctttgaggacagcaagtaagggattgaccagacagagatggagggagatctgggaacctggctggaaggaaggaagcaggagaggagctgccttgtgtagaacaaactgagaacaaaacgctaaaccctttcctggggaagagaatgtggagttgggggagagagctgtgccaagagtgcctgccccactgggaatctcagggacatgacccctccccccacaccttcctcagcctgcaggacaagtctgagtgcatctgaagcagggagagggtcactatggcaacatgaagtcctcacccagagactgcagaaaacgtaataagaggagttcagaaaaatggagaccaagggacctcaatctttttttttttttttcaatttatttatttttttttattgatcattcttgggtgtttctcgcagagggggatttggcagggagggacctcaatctttggaggagtcactaaagctctcttcaggccccaagataggggtgggaacaagacataaccacctcctgctttctgtcttctgtcttcctccagcctttaagtcccagcacaaaatacccctccaagaagcctttcccaactccctcaggcccagcttagaagcacttaagccttggtgtcttggttgtaaagaataaaagttgacatcagctgagcaacacaatgaggtagatgtggtgatcagcccccttttctaggtgcaaaaactgaggttcagagaggtgctgggcctcaccaaagattccccagggaagaagcagcagagctcaacccaggccctgggacttctgcctctgaacctgaagctcttcccacgactaccccctgggagggccagagtcacaaggggaggacccttgtcagctgaagtgtttcaggagtttgattgagtcctctcttcccatccaccctgtccttccccctcctccctcctaggcaggcggattgcctaggttaagaaacactagtctgggcgaggtggctcacgcctgtaatcccagcactttgggaggccaaggcaggtggatcactaggtcaggaaattgagaccatcctggctaacacggtgaaacctcgtctctactaaaaaatacaaaaaattaggccgggcgcggtggcttatgcctgtaatcccagcactttgggaggccaagacaggcggatcacgaggtcaggagatcaagaccatcctgactaacacggtgaaaccccgtctctactaaaaatacaaaaaatgagccggacgtggtggcaggtgcctgtagtcccagctactcgggaggctgaggcaggagaatggcgtgaacccaggaggcagagcttgcagtgagccgagattgcgccactgcactccagcctgggcgacagagcgagactccgtctcaaaaaaaaaaaaaaaaaaattagccaggcgtggtggcgggtgcctgtggtcccagttactggggcggctgaggcaggagaatggcgtgaacctgtgaggtggagcttgcagtgagccaagattgggccactgcactccagcctgggcaagaaagcgagactctcaaaaaaaaaaccactagtctgggcgcggtggctcctgcctgtaatcccaacactttgggaggccaaggtgggtggatcacctgaggtcaggagttcgagaccagcctggccaacatggtgaaaccccatctctactaaaaatacaaaaattaggtcaggcatggtggctcacgcctgtaatcccagcactttgggagactgaagcaggcggatcatgaggtcaagagatggagaccatcctggccaacatggtgaaaccctgtctctactaaaaatacaaaaatggctgggcacggtggctcatgcctgtaatcccagcactttgggaggccgaggtgggtggatcacgttaggtcgggagttcaagactagcctgaccaacatggagaaaccccatctctactaaaaatacaaaattagctgggcatggtggcacatggctgtaatcccagctacttcaggaagctgaggcaggagaatcacttgaacccaggaggtgaggttgccgtgagccgagatcgcgccagtgcactccagcctgggcaataagagtgaaactccgtctcaaaaaaaaaaaaaacactaaaattagctgtgcatggtggcgcgcgcctgtagtcccagctactcaggagactgaggcaggagaatcgcttgaacccaggaggcagaggttgcagtgagccgagatggtgccactgcactccagcctgaatgacagagtgaaactccgtctcaaaaaaaaaaaaaaaaaaaaaaaaaaaacacagaaactctggcagccatcacagtgtgattatttgtttatttcattaaatgtttaacgaggctacattgtttcccaaaccaatgtctaatttgtgaaggaaacagcgcagagaaggaagctgggtgactcctgcatctggggtggggaagggagtaaggtcccctccctccatcctacagaggcctttgaggatcagcaacagtcccattccctcctcccacccactgagctcctcagcccagagccctcctccccagaaataaaacgtctggcaacccagacctgcagaaagggaccaaaaatccattcctggtggtattgaaaatgtattaaactttggggggtcctccagctgattgatttttctaattatgtttgctttagatggatatttaaatgcatttgcattccctgagctcacatggcaggatatggaggttggaggaaagagggggcacaaacactccacactctgcactttggtggttgcaggcttgaacctgctatacactgagaagtccaaagtggaaaagagaagccactcagctaaaaatcgcaagtcgatttttatggcaggtccttgtggggaaagggtcagtcctcagagacagatggagatccacctagctgggcctggagcccctgccctctcctgtacccttagccgaggactcagggtctttgagtcagtccctaaccaggtctcagtttgagggggtggttatccaagcacacttagataatttcaaatgccattgaagttatcctagaatctttgagactggctgagatgaactagtcccataggagaggttgggatagggatatctgatgatccagggagtggtgggtagggattcctttcctctcaagactggaacctggcataagggaaaggagaagctattttttattttttattttttaattttttttagagacagggtctcactctgacactcaggctggaagacaatggcatgatcatagctcactgcagtctctaactcctggcctcaagcgatcctcccagcttggcctcccaaaggaggaatcttggctgggattataggtgtgagccactgccgagaagctattattttaaatgacacacctcagagccaaatctcccagctccaacaccacatccagataaccatctatccaaaaaacaactctgatcacttcactctctgcctgaaattcctggtggcttcatcctctgaggatgatttcattcatcctcagaatgaaattctgattcctctgtggaccctgcagtagcctcagtgtaccttcctagccttgtcttctattctccctgccatgggagccccaacagtgctatgctcattctcatctccacgtgtttacacatgctgtaccctctgcccagagtgcctttcctaccccttccctgcccggaaaactcctcttcaaccctcaggacctggctcacaggactggcttctcaggctgcaaggagctcccatagcatcccatacatgtacaaatatccctcagccatggcaccctcacacctgaggtacctctcttccacactgggctggcctccaaaagcttagagactggtccttgcaatctcccaagccagtgtatgccacacagttggtgttcagtacatacttgctgaatgaatgaatgagggaggaatgggctataaatttgggtgggatcccagcagatagttgggtaaggtcagtgttctcttccagtgtgtctgggagaactggctagggctgggggagggaagggccagggatggttcctgggggagaatgtcaccgaaaagaggccagtgggaccagagccaggaagggaatacaggacaatctgaaaccagactcccgagaaaacagaccagtactgtctttcctgacaacaggcgctcagccgtcctctccaccgtctttcctttaagggacagggtaggggtgactctaacagctgatgctcccctgaaagccatcatgaaactcagcatgggaggagagaaaggtccctggcctgagcctctaaggagaccccagaatcaaactactgacctcttaggaaacttcacgctgtacaggggtagcttctgtgatgtggaggcttttgatgccttcttttttttttttttttttttttttggagacagagtcttgctctgtcatccaggctagaatgcagtggcgcaatctcggctcactgcaagctccgcctcccaggttcacccgggttcacaccattctcctgcctcagcctcccgagcagctgggactacaggcactgccaccgcgcctggctaattttttgtatttttagtagagatggggtttcaccgtgttagccaggatggtctcgatctcctgaacttgtgatccgcccacctcggcctcccaaagtgctgggattacaggcgtgagccagcgcgcccggcctgatgcctccttatccccacaacccccagggtaccagcaggctccaagccaggggtacagatggtgagcaggacccctcccacactagcagcaggcctggctgggctgagaaatgctgactaattatatgtcggtctgctctaaaaccccctaatggcctgagaattgcccacttcattaactaggatgaacagtcccaggatgtctccttctcccaactctgactcctaaaaggacacttctgatccaacctatggctttgtcctctgctctatctgtggacatggacaggaaagttccccagctgaggtctaactttccctcttactgctaaagattggtagattgatttttttaaaaagcaacaaaactaaagccacagccgttttccatggaggtgggctttattaggtgactgttgaggcaagggaggttctagggctggtggactgatggggggcaagggcttctccttgcttttgaatttagtgcatgttgcctagaggttagatgtgtgagaatagctgcagaagtgagaggagaggaaaagagaaggtcatagaatggacattttccttgggccagaaccaggatatggggactgggggtggagagggagggtactcttcacataggagactccaccaaggtcaccatttgataccagcttccctaacgcccacctgccccatcccagttcatgccccagatgccagccctgttagctccctcaacatccactggagaagaggagggaggaggagatgagaaacgatgatacccttctgccctccagctcccctgcccagaattgctcgctctgcctgccctaacttcccagccaggatcaggaggtcaggaagcctgggcgcaggcaggggaacaattgtgtccctcaccacccctcttcacactctgccctctcctagcccctcacatgaggttgcagcttttggctcgatccttgtgtatctcgccctcattcccccggtctggccgtcctgacagctgagcggatcgctgcattccccggcgtgagtcagttcggcgcagctgcctatggccacggccaagggaggccactgtagccacatggaagacatccctgacgctgcgctcagaggaccgggaggagcactcaacataggacacagcccccacctgcttggccagcacagtgccctggaaaaggaaggagtgcatgggagaaagttataggtcttagcctgcagcttagaaaggggcatggaggctgtgggctggggttgaatgtcaaggctgggggcagtcaagggatcaggtcagaggtcacagaccagaacaaaggatgagccaggtaaggtgttttcaaatcagagactgaaggggcagaggtgacaggtctaggctgggatgaggtcagacgtcaagggtcccacctgctcatgtgtaacagggataagcctctgcttggacagctccctcagtgtggccaggtcagtccgcatgtccagtttacagccaaccagcacaaccttggcattggggcagaactcttgagtctctccttgccactatgtaggagaagaaaagagaattgtggaggggtggagggaggcacagcgtgagcctttgtgccatgccagcagtgtgccctctcttcctcaagcacgcagaaaccatgtatccctcaggactctcccacatgaggaaggaggtgagaatgctaggcttggtttgagagcaggatggggtgagagagaagcagcggggaggagagggctggcgtgggcctgtggactcttctccctcagtggctatgaagggtctgccagcctggaaacttcccattcccactcgcctttcccatactctctcctgggaacaaatttatcccaccctcccctcccccacctgggaactggggctgccctagctgacttctgtccattcacccctggcttttgtcatggaaactggggcctggagaggaggccacagggctttcctgagctccaggatcaggcttcccatcccatcccctccatctgggactcccactgccaaggagttggaagagcagagaaggaatcctgtgagtgcttctcccttcactcccccacctcccctagctgctgtatccagctctgaggactttcaggaaaggggtggctgggagggatgggggctggaggcaggggtggcagggatgagagcttcactcgctaaccagctgatggccataccccagccatcactccctcctcctggcccatgttatgtcaggaccatggtggtctggtccccctcagtctagctgccctatttccccaggctcccaccttcttgagaacactgtccagtgtttctggtcggctaatgtcgaagcagatgagcacagcatcagaatcaggataggccagaggccggacattatcatagtaagaggaacctgaaggaagacagggcatgaggggcctgagtggatgggaggcctggaagggaatgggagaccttacagatcctggtcaagggatgctgggagcagagaatggaaaagagcaaccattaatacccatcattaatacccatcatggagtctgggtttcccaagtgggggagcgggcagaagggaggtcacatggtgggaaacggctctctgcttccctagtggtttaaaaagtaataatttttattcttgactgaggtttggacccctttgagaagctcataaaatctatagacattctcataaaatgttgcatgtgctttctgggctttggcagtctaaagccctgaagggaactcttgtaaaaataaaaaccctccttatgttgggaggaggaaaagagcagtggcagggagagcactctcccattctcctgggacttgacctcagatttatctagttcaatggagagaaacagcctcctgaccacccctcactcaagacattctaaatgtcttttctgcttttttattttttgagatggagtctcgctctatcgctcaggctggagtgcagcggcatgatctcggctcactgcagcctccgcctcccaggttccagcgattctcttgcctcagcctcctggtagctgagattacaggcacgtgccacacgcccgattaatttttgtatttttagtagagacggagtttcaaccatgttggccaggctggtctcaaactcctgacctcaggtgatccccccaccccagcctcccaaagtgctaggattacaggcgtgagccaccgtgcctggcctctaaatgtcttttctaaacccagtcttatctctgaaggaacatgttccaaattaaaagccattccttcccaactttcccaggtaggcaggacccagctgaggggctcagatcctaggctttctccttcaggacatggtttctgtcaggctctgcaagttctacctcagtttccctggattttagcagaatattgatttttcccttcctgttggaattggatggatgggctgggcttacctggaacctaagggtctaaccaagggaggggacagagtgggccgccttggaagtcagggtgacccccagggacttggctacctgaagtgtcccacatgttgagctcaatgcggcgcttgtcgatctcaaagctcgcagtgtagttctcaaacacggtggggacataactctgcagacacggatggatccagatgagatcatctctccaagtcctcaccccagataaatgccctcctcactcccacaccccgtccagcccagcccctggacacaagttggtctgggattgggcaaaggggagatcccgggagctcctgcccccccccccccccccccggagaatctctgctaagctccaagacctcctcctgttcccttctggtcccttcagccccctagttcttcccctctccattgcccaggacctccgacattcccctcgccctccctcccggatgctctggttctcccaaaccccatctatctcaccctgctccctaattcctcccaccccaatcctctgcagtccttcctgagccctcaaggcctccccgcgtcctccgaccccctgtctcttgtccctggttacccgagtacccattcccatccgtcgccagggcccctgtcacccaccccccagcagccttagcgtccccctcccaagacgcaggtccctcaccccgggataggcgtccttggcgaacacctgcagcagcgccgtcttgccgcactctgcgtctcccaccaccacgatcttgcagcggccgctctgcccctccatggtcccggctacgagccggtcccccacgccacccctctcccggtcccctccttcgcctctcccgcccctgcaactgcagccgctcgggccgccaacaccggcatctcccgggcccgcgccgagcccccgccccgggtccgcggccccccctccgccccgcccccagccagcgccgcgccccccggccctcctcccacccccgcagccggggtcggggccagaagatctggcggagccctgggaacagaggcctcagagccggggtccagcccgccggtgtggtctgaggggcccctgccggtttgggacaggccgaactgggcttatttgactttctcggatataagggcaggtcagagttcaagcgaagttcttaggggtagaatatgagcggcacaagcgcgaagctcgggcctgctgtgtacccacgcgtgcacgcaggtgtaccagtgcggacaagagctggggcagccatccacttcctgaacacggcgggagagagatgctaaggggaaggagggagcctctttggttttctctcccgcgtccgcctatgtcctggcagggggtcttggggaaatgggagggtgaaccccagcacacccacccggacggtggtgacatcatagctttccgtccccatggcaacgggcagccgggtctccggttacattgacttaaccgccggcctagactagcagagaagcgtggactgagttcctccagccaagcactgggtggaaagttttgggggagctgcgtcctctggtggatgcttggggacaaggagataaggaagagaaagaaccaaccgccagagttgctctgctggagccagagctaaacccaaaagtcaggcttgattaagagtctgacaataggccgggcgcggtggctcacgcctgtaataccagcactttgggaggccgaggcgggcggatcaagaggtcaggagatcgagactatcatcctggctaacacggtgaaacccgcacggtgggcgcctgtaatcccagctactcaggaggctgaggcaggagaatggcgtgaacccgggaggcggagcttgcagtgagccgagattgcctcactgcactccagcttgtgcaatagagtttcgaaaaaaaaaaagtgcttttttatatcgaggcaattcgagtcaataatatatgctgcaaataattctgtaaagataactagaagctgggcgcggtggctcacgcctgtaaactcagcactttgggaggccaaggcttgcttgcgtgcaggagtttgaggccatcctgggcaacattagcgagaccctctctctagaaaaaaaaatcaaaacttagctaggtttggccactctaggcacgctgcctatggggtagccctgctctgcaaagagcagtaaaacataaagttagccgggcgtggtgacacatgcctgtggtcccagctattcaggaggctgaggtgggaggattgcttgaagccgggagtttgaggctgtagggagctgtgatcgccccacctcgctcagcctgggtgacagagtgagaccctgtatcaaaaaaataaaaatataaatataactagagcacgcagcatcatcactatgttacagaagggaaaatgaggaacagaacgttaacaccaaagtcagaaagttttaaaggcttggtctccatgcttctactttgccactgcaagaccacagtgaattaagtctcatccctgcctgggttagatgtcagagcctgagacacaatgtagttggactccagtccacaggtggctgactccaaatctgatatgagttaactccaaatctgatgtaagttcaagttttgggactgttccttaactttttttttttttttttgagacggagtctcgctctgtagcccaggctggagtgcagtggcgcgatctcgactcactgcaagctctgcctcctgggttcatgccattctcctgcctcagcctcccaggtagctgggactacaggcgcctgccaccacgcctggctaattttttgtattttttagtagagacggggtttcaccgtgttagccaggtgaatctcctgacctcgtaatctgcccgcctcggcctcccaaagtgctgggattacaggcgtgagacaccgcgcccggcctttttttttttcgagatggagtctccctctgtagcccaggctggagtgcagcggcatgatcttggctaactgcaacctccgcctcctgggttcaagcaattctccagcctccgcctccctagtagctgggactataggcacctgccaccatgcctggctaatttttgtagttttagtagagctggggtttcaccatactggtcaggctggtctcgaattcctgacctcaggtgatccacccacccgcctcggcctcccaaagtgttgggattacaggcgtgagcacggcgcccggccctttttttttttttttttaacagggtctcactctgttgcccagactggagtgtagtggcgcgatctcggctcacctccgcctcccaggctcaagcgattcctctgcctcagcctcccaagtagctgagattacaggcgcgcgccactaccgcccggctaacttttttatttttagtaaagacggggtttcaccatgttggccaggctggtcttgaactcctgacctcaaatgatccaccagcctcggcctcccaaagtgctgggattacaggcgtgagccaccgcgccaggcctatcccttaaaatagtttttaatttgaataaggtttactatgaataaataaatcacagtcggcttgatcccaagagcacagacgttcctggtgccccttttcgtgctctcccagcttgcgccactatggccctggccctttaaggctgagcgcgaggccccgcctcgcccggcgccccgcccctcccgctggatcccgcagccgcggctcttcccgacgcgttccgacttccccagctgtgcactctccatccagctgtgcgctctcgtcgggagtcccagccatgtccgacgagagagaggtagccgaggcagcgaccggggaagacgcctcttcgccgcctccgaaaaccgaggcagcgagcgacccccagcatcccgcggcctccgaaggggccgccgccgccgccgcctcgccgccactgctgcgctgcctagtgctcaccggctttggaggctacgacaaggtgaagctgcagagccggccggcagcggccccggcccctgggcccggccagctgacgctgcgtctgcgggcctgcgggctcaacttcgcagacctcatggctaggcaggggctgtacgaccgtctcccgcctctgcctgtcactccgggcatggagggcgcgggtgttgtgatcgcagtgggcgagggagtcagcgaccgcaaggtgagcgggttgcgtagggcagggcagggctgcgcaggccactgggcagtggggcacgagtgggcgagcgccgggggtgtggcagggcgggagaaactggcgcggacctgggtgcacgagcgtggaaagcgtagccaaggaacttgtgtttgggggctcctggagagcggcatttatgtggggaggggagacgaaattatcgccccttccccaaccattttaagttgtggccgccgcccagaagctgtgctggtgggggggaaaacaataaggtgcccatgcgcatgcgcacaaccacactaccgtccccacccaccccccccccccccattaaaaccacacctgtacccctacccaccaaacactctctgggtaattgtggtctgtgactatgagtgacggttagtgccccctttccccgagggagcttgaggggctatgtcgtcggggttgggcgggggcacagcggccgtgccagagtcctggtcacatgcagccccgtggtctgtgggggtgtgaggcggcccctcccaaagcaaggccaaagagacgagacacgcccatcacggaggagagagagcctttgctaccccaccgccaccagccttacaccgccgatctgattttggggtgggggaggcgggattgggtcatccgatctttgtcttgggctctgtgtctcccgtgactgcagtatctcctcctcctgtgactcagccctcagccttcgggccacgacccggggctgcccttgggaatgcctggggcggggagtggaaggggggacccacctctgccttcctcctgcagaggacccccacttcagaaaccccagtgccaggggtttggactggaacggagaggtgcggcgccttgaactggttggccaagtctgcaggcctgtttctccttctcatttatcattaatcttggccacaaccctggacaccagagagctcaaaatgatcagctttttgagagacctgggatgaggcctcagcacgccatttgtttagaggtttcttttttttttctttttctttttttttttttttttttttagacggagtttcgctcttgttgcccaggctggagtgcaatggcgcgatctcggctcaccgcaacctctgcctcccgggttcaagcgattctcctgcctcagcctctcgagtagctgggattacaggcatgcgccaccatgcctggctaattttcgtattttttagtagagacaaggtttcaccattttgggcaggctggtctcgaactcccgacctcaggtgatctgcccacctcggcctccctaagtgctggggttacagacataagccactgcgcttggccaggagtttcctttttaaatcagacccctcaatgagaggccccacagatgcagcctcttgcagacctgccagcccaattctggagccaggtttgttggattcatcctgtatgcaaacagcttctccttaaggctttcctctgaattcagctctggccccaccctcaaactgacttctaaatgatcccactcttgagcaggcgtctaagaggaatattttcgggaggtagttgtagttcatgttactgctgaaggccacccacctcacctcccctccatacactttccgcctggtaaatacaggatatcctgtccagggcaagaatctgatgtaagagcctggattctgcggggagggcccttccctctctctccctcctcctccctcctggtgtctgggttggggaggggtcatggccctgatttggatggcctgagggttagcatgagccagggtaagtgagacttgttctgggtcaaatctgggactggccatgaccctaaatgaccaatgcactcctcgcagctctcctgggttgttctgtatctgctagtcctgagtccctgggtggagggcttccgttcttgttctccagacctcatctcaggccagaacttggaaggaaagaccccagcatgccctcagttctcgtattcagtggagtgtgggggcttgaggacatgaaaaagggcgtaagtggcagtcccatcccccttccccatggaccctaactcttgttaatatacagaattcccatcattcctggcagggatcaagacagacccagattgtcccagaacagcacccacacctccctcttcatgctcttcagagagcgcagagaagtcttttctcctgacgctccctccttttccctgcccttcccttgaccccacttgctaagctggagagaaaggttctgttatctttgtcccctttccctcctgcacagaggctctcgtgggggtgggggggaagccttttactgctgcgtaggcctctgtagcccttcttgtctgttgcccctcctgcaccatctctgagtgaagatgttttctgggctcccagtgctggctcaaacacacttctcccgaggtgaccacaccctgctgtaagcgctcagagaactttgtctgcactttggtatggccctgaccacacagtgccgtcttcttttggttgtgtgacttccttgctgctattatattattattattattattgttagctaacattattaagtgcttattatgtgccagacattgtgctaaaattttttttttccatttggaaaaactgccctaattgacagataagaaaactggagctggaaaagtggagctcaaaaagattaagtaatttttatgcatccgaagtcacacagtcagtaaacagttgagaccgcttttgtaaccacagcagtttgatcttttccacaatacttcatgctgccctaactgtaagcttcttgcattcagggatcttacacaatagtgacatgtaagatctgtaagaagatgataaggatagtatctgcctcaaagaactgatgtaagggttaattaagcattatatataaagcacttgaaatcgggctcggccctcagtcagcactcagtaaaggtgagttgttattgttgttgatgatgatgttattattattattaccatgactattgctgcttctcctgctacttcatttggaagaaggtggccttgtacctagggggaaatcagtaaatagcctgtgggtgaatgaatgagtgactgaatgatactcttctgttcttcaaggcaggagaccgggtgatggtgttgaaccggtcagggatgtggcaggaagaggtgactgtgccctcggtccagaccttcctgattcctgaggccatgacctttgaggaagctgctgccttgctcgtcaattacattacagcctacatggtcctctttgacttcggcaacctacagcctggccacagcgtcttggtacacatggctgcaggtgacaggtcccctcactttatcaccccttaccccacccagatttccttccaggccccttccctgcagcctgtctgggttgttgtcatggcaacaccaggctgccttggcctgtggctcccagaggcctctgctgtgtagttgccgtggtaacattcaggcaccaggtctagtctggtgtgctatccttagcaacgtgccctcaccccacacccccacctctctagctaccttccccaccacttctcagtcatggaaattagacacggccctaaaatgagcgtaggcaaaatgaaggtgacaggctgagtccctgggaggctagaatggagtggttggtggccagggcaactccatatcccctgcttatgggtgtcttgctgcagggggtgtgggtatggctgccgtgcagctgtgccgtacagtggagaatgtgacagtgttcggaacggcctcggccagcaagcacgaggcactgaaggagaatggggtcacacatcccatcgactatcacacgactgactacgtggatgagatcaagaagatttcccctaaaggtggggggcataatatgggagggggtagggaggcacaggacagggaggggagctccagatctgtggatcctaatgttgttcttgggttcccctactctatgacaggagtggacattgtcatggaccctctgggtgggtcagatactgccaagggctacaacctcctgaaacccatgggcaaagtcgtcacctatggtgagttagtgggccagggatggagagagcatgtgagggcaggagggagggtctaaggggtgggatatagaggccagggcttttgaatgaagaaggggtagggactcaggtgctctgtagacgatcagggttaggaatggtcctgtatgctgcattcagattgctgactcttgggtaccagctcttttcattctctgtcacaacttttcatatgagtgatagtaaattctacattcttttttttggttttttttttgagatggagtttcgctcttgtcgcccaggctggagtgcaatggcatgatctcggtcagtgcaacctctgcctcctgggttcaagcgattctcctgcctcaccctcccgagtagctggaattacaggtgtctgccaccacgcccaactaatttttgtatttttagtagaggcggtgtttcaccatgttggccaggctggtcttgaactcctgatctcaggtgatccagccgcctcagcctcccaaagtgctgggattatagccgtgagccaccacgcctggccaaattctacattcttgtttggggattattcttgaacaaccagcctgccttctttctgtcctacctccctgagcatcttaggcagggtgcattttcatttaaaaaagtatttcatacaacaaaataagccaggcatggtggctcatgcctgtaatcccagcactttggaaggccagggcaggcagatggcttgagcctagaaattcgagaccagcctggtcaacatggtgtaccttatctccacaaaaaatacaaaaattagccaggtgtggtggcactgtactccagcctgggcaacagagcgagaccctgactcaaacaaatgaacaaacaagcaaatacataaagattagagcaatttttttttttttgagacagaatatcactctgttacccatcctggagtgcagtggcgcaacctcggctctctgcagcatccacctccctggttcaagcagttctgcctcaggctcctgagtagctggaattacaggtgcccatctccacgcctggcttttttttttttctttttcttgagacagagtctggctgtcacccaggctggagtgcagtgacacgatctcggctcactgcaacctccacctcccggattcaagcaattcttctgcctcagcctcccaagtagctgggactgcgggcgcacgccaccatacctggctaatttttgtattgttgtgggtttttttgtttgttttgttttgttttttttttttgagacggagtttcgctctttttgcccaggctgaagtgcagtggcgcgatctcggctcactgcaacctccgcctcccgggttcaagcgattctcctgcctcagacttcctgagtagctgggattacaggcatgtaccaccatgcccagctaattttgtattttcagtagagacggggtttctccatgttggtcacgctggtctcgaactcctgacgtccagtgatccgcccacctcggcctcccaaagtgctgggattataggcgtgagccaccatacccggccaacacctggctaattttcgtattttttagtagagacaaggtttcaccattttgggcaggctggtctcgaactcctgacctcaagtgatccccccaccttggcttcccagagtgctgggattatggatgtgagccatagcacccagcccctagagcaatttaaagtcagccagggttggtttgggcctggtaaccagcagtttgagaattatccaatcactccctggcactggtgtggagaattgcaaggggatcacagggaacagagagcacagatgcagacacacagggatgtgcctgggggggttcacaggctatgtcaccttgtccttcaggaatggccaacctgctgacgggccccaaacggaacctgatggccctggcccggacatggtggaatcagttcagcgtgacagctctgcagctgctgcaggccaaccgggctgtgtgtggcttccacctgggctacctggatggtgaggtggagctggtcagtggtgtggtggcccgcctcctggctctgtacaaccagggccacatcaagccccacattgactcagtctggcccttcgagaaggtgaatgtgaggactttgcagggagggcttgggtaggactcatgaaggctggggtcccaaggggcagattcctggggaagaggagggctgcctgcatcacactggcccctgttggatgagggttggatagcactgggagccgcatctttccttcctccccaggtggctgatgccatgaaacagatgcaggagaagaagaatgtgggcaaggtcctcctggttccagggccagagaagcagaactagggcaagtggctgtgagaccctagagaccagcgaagggagaagttgggaagctacgttctgttggccaccagacttgcatttcagcctctgtcataatgctctgccctccctcccccgaagttctctgtggtgatgaccgctctcccctgcccctccccgcttcctgacctctgaagaggttgggaagtgaccatttggatgtctgggccctgccaaggcgacagggagggtcagagggaggccggctgcttcctgcccccaccctttccccgggcctgctgtgctgcttttgtgccaaggttagccagtcccccctgttgtgttccatgtgctttcacctctgcctcatctttcctcccgtccctgccccgccacctccccaaagaattgaaacgtcagctcaggatatggggccaatctctgtgagtccagcatgtacctgtctctccctagtgtcccttcagcctgggctgaccagtgcccgcctctgggcttgaccagttcccaatctcgtcctctgtccccaacttcttaagcacaattgggcttcttccatctccaggttttctgccattcttaaccaaggctgcctcttccaacagggcgggaatcagacctactcccctaggtcacaactctgggaaggatacagagcccccacccttcactgagttctctggatttgttctcagtgccttagcaacgaaaacctgtgcttgtgtgtgtgtggcggcggggagggaggatcctgtttcccacctccttctcctcccctgtactccccagtgccttccttgttctggtggagctggggtttctctcctccccagtcccacaacactgccaaaaatctgtgtatgtgccattgggtggggcagccccaagcctcctggggaggcagggcaaaaacaggtgccctcatcgtggtctgtgccatgtcccgtctctatggtggttgaggagaaaggcggggaagcttcctcagccttgcagatatgtgtggcatttactagccagagctctgaaaggcagtgctgtctgtttcttgtactgggaccaaagtaaaaatccaagcacattccccttgcagttaggggaggccctactgccttctcaaagcagagaggcagcttatcaaactcagcccaaaactctgtttacatgggtggggagatggagcagggaagtacagagtgggatggtcaggacctgggccattgcaaccaaaatggggacttcctgggtagggaggtcactccctctactcactgagctaggattagggagggttattgccccaaccattgcaatgggaggtggagggacaggctcagcctcctcattgtctaaatgaggcctaaatgtgtgaagtgcgatttctgcttttgtgtaccccaccaccccattaccacagctgcctttgtgtgtttgtgtcaataaaaagccaaaccctgggtcctgcttgttgcctctgagagtggagggaaggtgagctcctggaaggctagtgctgccagcagaagatctgggctgcttcctgccccctgcctctttccatgcccaaatcacgtttcctttcatgagtgaaatgaggaagaacatcatggcatgcaggctctttttactgttctgggcagtgttttgcaatgtgtgacccctccgcactgttggtgaacatacagacctcctatatgggcacccaagcccaggccagtgtgagaaccttggcgggggggtggggaggatgagaaggggaggcccctagcctgactcagaggtgaagactgctaggccctgctgtccttggggtacgactgtcagggcctctacctccccgcccccgcgggtgggcttctggaagtggatctccaggacgtcatgcagctccgggccatccaagatatcaggaatgttgagcaccagtaccgagcggggaactggctgcgacctgatctggaaaaggagccaggagatggcaaaggctcatgggagaagggctgggggctgggggtagggcaggcagtgccccatgggggtatgaggtcgggaggcctggagaggctgatggtgggtaggtaggtcagtggggtttggggcctctgatccttcattgggcaagttcctggcaggcagacaggttacccagcccagcccctgttcttcacccctcctgcttacctcagccttctggatctccccattcacatacggagagactctcagagggacttgctgcccacccagtggcactgtgaactggccgatttggcacagacgctgagccactgtggggagcaaggaggggtgggcctttagcatcaagccctctcctctccctgcaccataatcttgcacaccctataccctctcccctgcaggaggcctgcatagccctcacctccatccctagcaaaccccagcatgacactccctggcagtagctcccgaacgtccacatcgccacctccgttcctagtcttgccaaagaagatctctagcttgtccagcagctcctcctcactcagcctgaggctggcaggaaatccagtgaccaacaccctccggccactcaactggctggacacctagggggagacagcaaggggtggtcccagacacagctccacttccccatgcccaggtgcatggcatgctttgcatgccccaggattctgtcataccatcacctggatggtggtgaccatgggcagctccaagggctggacctgcacccgcagccggcactcctccatgttgatcgtgtgctccttttgttgcagcacctgctcagccactgggtggtgggaaacagggtcagtactgggaaccctccccacctccctcctgaggctccccatgagcttacctttggggtcatcaaaggtgatcagagcagagcccgcaagcagagggcagtggatccgcaaattggaaactaaagacttaggcacttccgggtcctgctgggtgtgtcctcggaataccagggggatcttgggcactgaaaatgggacctggaagtaggggaggggagtaggagtgttcctcactcccacctaggaggaaggcatctccgattccattccattgatgctgagtgccggagataaatacatttactgaaagaaaagctggataaatgagtggatgaatgcaggtctggtccatacagggcaatttacatacaacatcttaatttgtcctgggaggtgggtagctctactttacagatgttcaagtaacataatggaggtcacacagcaaggaagtagcagagccaggaataaaaccgagaactccccagctcttttttgtgtttctttgttttaaagggagtcttgctctgtcacccagctggagtgtagtggcatgatcttggctcactgcaacctccacttcccaggttcaagcaattcggactcagcctcccaagtagctgggattacaggcatgtgccaccaaacccagctaatttttgtatttttagtagagacggggtttcaccctgttggccaggctggtctcaaactgacctcaggtgatccaccagcctcggcctcccaaagtgctgggattacaggcgtgagccactgcgcccggcctaatttttgtatttttagtagagatgggatttcactgtgttggccaggctggtctcaaactcctgacctgaggtgatcaggcccccttggcctaccaaagtgctgggtttacaggtgtgagccaccgcacccggcctcgccagctcgtttttaccaaacaacaccagatcctttagggggggttattgcgggcggatttttgaaacggagggctggtgataggctttttataggtatgcatgtatatggttctagcgtagtggattttgggaattgcggt

SEQ ID NO: 28894 - DNA, 17763 bp, Homo Sapiens
ccccagtgcccactgcctttcctccctgttctactccgatttctgaagctgtgtgtgcaatgaataggtaaagcggaggatcctgaaatgccaatgtttgagaactttccctaccttgaagggaggccaatgcacccaaagttgaggaccacgtcttttccaaaggcctcatgtagccaccacaggctccaggaagtgccccctgctcatcagggtgtctctgtggtctccaggcctgagctcactcacccaccatgctgctgctggttcatttcaggtcatccatctccagccccacctgaccagctcaacaccagcagtgcagagagtgagctctgggagccaggtgagcaaacattccctctgggggtccatgatcagctttctgtaggtggtcccccagggtaataaagaagggaaatggacatttaggataccagggaggctccctgacttcagacaacacttcttcctgacccatcacctgaagttccactatcaattcactttgaggtcgtagaactaccatttttgagaggacactgataagtcacatacaggtgggcaggtatgcctggagcattttaaggggatttgttgagaacaggctagagttcttggtgggggaggcagggtccttgatttactcagcagacgtttattaaggacctactgtatgcaaagatgcatgctagcactgggggtacaatcctgggctaaaaggggcaggtggttcccatagaaggggttctggggaagtgaggaccaccatcagctgaagcagcccatcatcaaccccatggccagccccttcacaatcctccaaggttccctagtcactgtgacagcctctaggacagtaccctcagaggagcagaggggccttcgggggaagcatgcgcccactggaccagggcccctgaactcacaactctgcctttctttcacaaacgggtgcccctggagacaggagcaagtgaggagggtttctagggggctggacccctagttgtctgtcacccatcttaacctctagagtcactcccaagccccaccttcggctgactctaaggagaaccacagggtcaggcctcaaggtgggctcagggatgagccagcccggctccattttgcagactggaaagctgagacccctagccaggcagggcgttgtcaaagttcacgcacagagtcagtggcagagcctgggcaaccctctgcccaggccccaccggtctcagctctctggtctgacacttccaggggagcggcttccggtccgtctgacaaacgggagcagcagctgcagcgggacggtggaggtgcggctcgaggcgtcctgggagcccgcgtgcggggcgctctgggacagccgcgccgccgaggccgtgtgccgagcactgggctgcggcggggcggaggccgcctctcagctcgccccgccgacccctgagctgccgcccccgcctgcagccgggaacaccagcgtagcagctaatgccactctggccggggcgcccgccctcctgtgcagcggcgccgagtggcggctctgcgaggtggtggagcacgcgtgccgcagcgacgggaggcgggcccgtgtcacctgtgcaggtacgagcgcaccccctacacccccccccacctgccccactccccaggccttcagccactgcccctggctccagaccctggacgcaagcctcgccctccagacctccacccccaccgcctaccagtgcaaacgcaccgggttcccacaccggaggacgacctcgagtcatttccagatctgagcgtttccttggatctggcctccagactccacccccaccacttggttcctagtcccacccctgggttcccaaagctaacccggtctctaaccccacttactgggcccgccgcttccctgtccccgcccgctctgggtctctcctcccatttcgctatatacataaacatgccaggttcacagggtccctaagcgctgtggctcccaggctcccaaacctgccctccaggccccgcccaccaggtctctggtcctcccaccagcctgcggctctacctaacccatctgcagtcctggggggattcccagtcttgcctaccgggctacagccctctcactgggtccacaacacgctcacaactctccggccagtccaaccatcaccccaaccctcccttcctggtcgggtgccccagcatccacaaccccctcccacccctagagaaccgcgcgctgcgcctggtggacggtggcggcgcctgcgccggccgcgtggagatgctggagcatggcgagtggggatcagtgtgcgatgacacttgggacctggaggacgcccacgtggtgtgcaggcaactgggctgcggctgggcagtccaggccctgcccggcttgcacttcacgcccggccgcgggcctatccaccgggaccaggtgaactgctcgggggccgaagcttacctgtgggactgcccggggctgccaggacagcactactgcggccacaaagaggacgcgggcgtggtgtgctcaggtcagtgggcggagtcgctgaagcccggtcactaccaacactcaccataggcctactgggcgccaagcctggagttagtgccggagaggtggtccctgcccttgagatgtcacagttcaggaggggagatgagactgagacaaacatgattcaggagagaaagtggtaaatgcccccaagaaaggcagtcaggtggagtctagaggcagcagaccatgcggagctgtaggctaaggctgaccacctcccggaagaggtgacattaaaagtgagactcttcccgagtgggagttggccacctgcattcaagcagcaaggggagactgaagggagggaggcctctgaggaggctgttggtctgtccaggtggggccagaaggttctggaccagccggtgcctctctttgataagcaggagatgggggaggtgggggtgttaaaatgtagattctgattcagtaggtctgaggcagagctccagagtctgcgtttctaacaagatcccaggcaatgccgatgctgctgctccacagaccacacttatcacagcagggttggccagagcaaatggggcaggtgacagggggacacagacacaggagggagaagacacaagatctggagaccaaatggctgcattggtgcctgcactggtgggtctgggctggcgggaatttctgcccaaaggattctgacctgactctgtcccctgccccttccctgcagagcaccagtcctggcgcctgacagggggcgctgaccgctgcgaggggcaggtggaggtacacttccgaggggtctggaacacagtgtgtgacagtgagtggtacccatcggaggccaaggtgctctgccagtccttgggctgtggaactgcggttgagaggcccaaggggctgccccactccttgtccggcaggatgtactactcatgcaatggggaggagctcaccctctccaactgctcctggcggttcaacaactccaacctctgcagccagtcgctggcagccagggtcctctgctcaggtaccccatcctactccacccccccagatttgagccagaattctacctgaatccatgtcctaaaaacttacagtccaaggaccacaataggcaccagatcggcaatggcacatatggcataagaaggactgttgtccttacggtgcccaggcagacagtgctaattcatcgaggtattttcagatgctccactcagccccagaatgatgaatcatatatgaagacattatatgctaagcaatggttcctcttgactgggattgactcaagagttgacaccaatttgccatcccaggcctggtgatgatagtaaaaataatattagcaggccctagtaataatatcggtgacagcttctggaaccctgatcatatgctaggcattgttaagcactaagtagctcttatttcagctgagcctcatacccactctatgagttgggttccaccatatctcgccaaatctaagatggcattgtttatgtcacaccattattattttatgtaccataaagaagaacgaacactgccaaaataaaccaccaaacgtaatgactgaggccattatcccaatttcagacgtgttaaagtttgaaaaaacgtgagtgttagatagatctgaagaaacatggtatttgcattcttacggcattcagacaccagattacaaattccagctctgccatttacgagcaaggaggcttccgacagtcccttaacctccatgtgtggatgctgatactaggcacttcgcaggatagctgggaaacctgatagtatctgctgagggacttctaagctcatttctttgtgagcctacctgcccaacgggaatgccgattatgataatgaagataatgtccgctcttcatctccctaggctgattaagaacaaactgaaactgaatggaaaacggatttgtggtctgtagcagcttacacagaaagaagggataattctattagccctttattttaaccaaagagccttcccagcatttaatccatgagttcctccttactgtggggggtggggtaggggagggaggtaagtttccttagccacgtgtccctgatgggagcacaaccctagttctgggtcacttgtctgtcccattcagtttctaacccaaggcctggcacacagtaggtgctcagtaacatgcactgagtgactgggcggtgctttctgacagcttcccggagtttgcacaatctgtccactcccgaagtccctgcaagtgttcagacagtcactataggtaagtgttgctgggtactacgcggtttctcagaagcttggacgtgtgtgtgtgtgtgtgtgtgtgtgtgtgttcctgtgcacacctgtgttggggtggaggatggtttggtcctcatcctccacctccagccaatggacttgcctccccggggctctctgggtggcatttctgctccttctacatcccctccttgccaagtcagcccatagatcactgagtcctgatacttcctggacagaagtccattcccccactttcctgtgagctgctggagggcagaaggaaagagctggagagagctgataaccacctcaagcaggggtcagggtcggggcagcagggggagggtgatcttggcccagctgggtagcgggaatgccagcacacagccctgtgttcataaccggccagacactgggcctagggctttatagccattatttcccaaccctttaatcctcttggtagccaaatgggagaggtcttattataacccttacatcaagaaaggagctgaggctccgaggctgaagtcacagctagagattgctggccagaactgacaaccaaggctctgaattccagatccattcttggtctacccaccagctgcgtgtagcttggctggcatcagagcagactcccaggactcaactcccagctgtgcctcttgctagctgtgccctgttgggcaactcggaacctctctgagcctcagacacctcaattataaatggggtgataagcatatagtactttctcctagcattgctgtgaggctccagtgaattaatttttgtaaagcacttagaacagagcctcaaagacagtaagaactgtccgaaagtctgctgttgctatgagtatttagttcaggcattgagcccctttgcagtcctgggatacccacaggactcccttgctctgcctcctagctctctgtcatcttctctcagacacccagaagcagtgaacaggggtttggggagagggcacagaggccttagccatagatgacagcacagagaggaaatgaaatgtacaactgcacaggctgccgggcaagctcctgccaggccccgcaggcaacctgcacacgctttctcttcctgaggttggagtggggatccacgccatcctggaagggcaaagagtgaagcacaaagagagatccagggaccacaccccggcccttggtccatcagcccctccctcggccacggccctctgtacccacattcacgggtctccccatggccgcaacacccagcctcactctcacatctgcttcctgctgccagatccagctcccatcctggcccaaacttccccatttgcagacagagaggggagaggagaaaatgaagacggggagaggagaaaatgaagacagggagagagttctctcccaggggaagcagactctgcccccagcaaagaggtctggatgatctcatctccctccccgttgctgtcactactagtcatctagccctgtggtctgctcactccaggaaccctcctcactgaccccctgtatccattcttgtgcttcacattcttttaagcagaggggaggctgagggagggggagggcaagaagtcacccctgagtggggctgcagaggtgggagaccctgaatcccagaccccactcccgtcctcatggaggggatgtctggtgggaaggaggggggagctcaggcacagctcttctgatggtctgttcactgccagaggtggctcagagtcactgtctctgggaagtcagcgttggtcttccctcacagagaatgaagtgccttttgtagggcctcatgcccccagtgtcgctgttcaaacctccatcacagcgggtgcctcatcatactggactgggttacttattgatctctccgctagacaaagcccctcaaggcctgtgatactgttgtcttatgtgtagccccagggtctaggccaggcacacagcgggtactcaatagttgtctattgaacaaagactacatactgaagagctagcagacagatagatctctgcagcctggtggccagagttctatttcaggcagtaattcatttaatcaattgctcatgcattcaatatgcatttattgagcgcctaatatacaccacacacttaaaagcaatgagaaaattggaaaaaggaagcaaggaggaagataacataaaaagggaagcaggtcagctttacagagaatggaaaggcaagaagaagggtgagtgcccattcctctttcttcctgaattggaattcttgtttccagaatcttctgtgacagtgaaaatagagaacaaggaatctcgggagctaatgctcctcatcccctccatcgttctgggaattctcctccttggctccctcatcttcatagccttcatcctcttgagaattaaaggaaaatatggtaagtgcaaggttctgggagccatggccatcccagggggatgtgagccttggcagaaccccagcagcagtggcgtggtccagcaatgaccacccggccctggccctggggagatccccaaggtggaaaggattttcccagcatgcccagcagtcatggacgcaccagcggggagaaccagactgtgcatgtgtgtgtgtgcctgtgtttgtgtgtgtgtttgtgcgcgcgcacatgtgcctgcaagtgttgggggaatgaggagggtggtgtgtcgatgagaacagaacggaaccaggtagactgggagagggcaaaaaaatgacttgtagaatttctgcctcccctccctcagccctccccgtaatggtgaaccaccagcacctacccaccaccatcccggcagggagcaatagctatcaaccggtccccatcaccatccccaaagaaggtaggatgtcccccatcctgggtgtgggagggctggggaggacaagaagggtgagctttctggaaggtcagcaccacttaggtccaagacgtacacacagctggagatgagatctgggccagcccactcccggccctgggaccttgagcaggctcaagtcgtccctggacattgaagggcagatgaccttccagttcagtcatgctaggactctatagagttttgagttctggacaaatacaggcaaagcacgttttagatcttggttctcagaggaaagctctgttctgctttgctctgctagttggctagtaggcttgtgatatcatcatccctatcaatgtcctgcccaattggccttgcgaagcccatcaagattctcctagaatgtggttttatttcatagttcatattttctaaacaaaaaaacaaattggccctgggtacagtggctcacgcctgtaatcccagcactttgggaacctgaggtgggcagatcacttgaggtcaggagttggagaccagcctggccaacatggtgaaaccctgtctctacaaaaaatgcaaaaattagacaggtgtggtggcgtgcacctgtaacccagctacttgggaagctgaggcaggagaatcgcttgaacctgggaggcggaggttgcagtgagccgagatcacgccactgcactccagcctgggcgacagagcaagactctgtctcaaaaaaaaaaaaaagaaaagggccagtcattcatcctttatgatatatggatttatacctcttgcagaggaatgtgagcttaatcaccttgcattatgaatgtattcaatcacctttatcgcaaagagttcaatgacataaaaaccaatacaaaactcagccaaatattataaatatcctttgcacagagagtccatatatatgaaaagagaatgtgaatacagcatctagcataaggcttagcataaggcagctgctcactgaatagcacagtctagaggtttagagccagactgccggctctgggccaggtaagaacctgtctgtgcctcagttccctccaaggcaaaatggggataataatgtacccacttcacagagttatcatgagggttaaatgaggtaatacttgtaagtgttagaatagtgcctcacatatagtaagtgctgtgttaagcgtttgctaaataaatgtttagttctccatattggaaatgaacgaaggcagcctagaaacttcagactgggtggcttgtacaagatgggctacccaggttgggcacactggtggatgcctgtagtccccgcattttgggaggccgagggggatggattgcttgagcccaggagtttgagaccagcctgggcaacatggtgaaaacctgtctctacaaaaaattcaaaaattagctgggcgtgatggtgcatgcctgtggtcccagctactcgggaggctgaggtgggaggatggcctgagcccaggaggtcaatgcggcagtgagctgtgatggcaccactgtactccagcctggacaacagagtgagaccctgtcccagaaaagaaaggaaaaaaaagggggctacttggtgctcccctgctactctgcctctcacctctgcggttcatactctaccatctctccctacgcctttccgcccaccactttgccatgccctcgactctgttctctccccagttttcatgctgcccatccaggtccaggccccgccccctgaggactcagactctggctcggactcagactatgagcactatgacttcagcgcccagcctcctgtggccctgaccaccttctacagtgagtgcctggccgggctcccgagggcccacctacctgaatctgggagggggccccgaggggaccgtcaggtcagtagtcccacctagtaacccctgcatgatgcagacagaatccccctggttacccactggattgactgtaaatggtcctacactgacgtttgcaccgtgctttgtgaccctggggtcatctcgatgtctcaggacatctccactctgacctctgtctctcccatgtttgtctctggccacgtaaggtcttaagaccaggcctttgacattcacctgaagatggctctctgtgtgagagcgggggagtgcggatgagagacacagttggcaggggttctcgcatgccatatccctcccgtgtcccatcctgccctgtctgaccccatcagccccactcacttcctcacctccacgctcttgccagcttgtgctcatagccagctctttcatgcctctgggataggaagaggaaagataacgctgaaggcagttccctggcaatgcttgggaggttggaatagaccagagcgatcccacaccttattgtggaatcacttgggagcttgtcaaaaattcctgagcccctccccacacctaatgttatcagtcaggatgagaatttggctgtgtgtgacagaaagctccaaatgacagtgtcttgagaggttggcaggggcccaggccccttctttcttgctgctgtgcagtccctaagatgttgccttcatctacatggtccagaatggctcacctccatgtccacattccaggcaagggcaagggaacgatgggatgctggagatggccacagattcccgctcacaacccagcacccagaacgaaaacccactagctgcaagagaggcagggaaacgaaggctctgtcctgggcagctgtgtccagataaaagccagaatggatattggggaacagacagccgtccctgccccgcctgctaacccagggcttctgggggtgggacacggatgattccacttcttctggcctgtggaccagtgtttgggcgccacagggatgaagtgtctgtcgaacctgagattccgagcccaggcatataagatgcaagactgagagtccacagtgctttaacattgaaattaaaggtcagtgtacccggtcaaagagctgactccaagatcccaagacacctcatatcctcaagactctataaatctctgattctgaaacgtgaaggtgccacagagcctgtgatgcagtgattccagaccatctgggtttcactctaggaaggcttcttgaaggagcaaacatctgtccttctcctgcccagagctgccaggtcacaaggacagaaccaagactcttgatacctctctaagtagcaggagggacagctggggctgggggctggggggttgtagggcactagagtttctgtccccaggctagattaaggcgaaggctctgctggattgggatatgaacctggaatttgatgggagatgctaagccctctctgcctccggagttgtcctcccaccctattcagcctacccaggccccgggaagtccagcctcttctccaggctcctaaatgatgaggttgagccttcacccctccccaccgccgcctctgcttgcagattcccagcggcatcgggtcacagatgaggaggtccagcaaagcaggttccagatgccacccttggaggaaggtgagtcaggatggggaggggtgtgaatggcagtcccacctccagagagtagctcagctcagcttgagaccttccagcaggaacctccctcaatgagtctttcctgactttcacaaatcctataggcagtaagtgctttctgaagtctgacttaaagccctcttgctgcactgcttctttcgtcaccattctccctttcctgccttaggacttgaagagttgcatgcctcccacatcccaactgccaaccctggacactgcattacagacccgccatccctgggccctcagtatcacccgaggagcaacagtgagtcgagcacctcttcgggggaggattactgcaatagtcccaaaagcaagctgcctccatggaacccccaggtgttttcttcagagaggagttccttcctggagcagcccccaaacttggagctggccagcacccagccagccttttcaggtaagctgtgcctcccccaaacccccatcccatagccagcctggctggaggaggcataaagctgggagccctgagtcaggctgaggtcaggattgctacccagttccgcagccattcgctgtgtgcccttggacacatctcccatctctgggccttcactttgtcatttgccaagactagggacttggctctcgtgagtcacgtgggccccccagctctggcaacttgagaagtggctgcgtgctggcagagggtgactggttctgggggtttccagcagggcccccggctgatgacagctccagcacctcatccggggagtggtaccagaacttccagccaccaccccagcccccttcggaggagcagtttggctgtccaggtgccaatatctggggaagggatgtgggagggggacagagagggactggggagtaaatgagtggggaactattggatgcattcgctcaaggggaaaaggagaaaggaaggggaaaaggagaaaggaagggtaaaagaagagagggaaagtaactttttaaaaaacaaagcaaggccaggcatggtagctcaagcctgtaatcccagcacaaggcaggaggattgcttgaggccaggaatttacgactagccccgggaacatagcaagaccagtctctacaaactaaaactaatattagccaagggtagtagcacgtgcctatagtcccagctcctcaggaggctgaggtgggaggatcgtgtgagcccaggagatccaggctgcagtgagctatgatcgtatcactgtgtatcatgcccctgcagggtcagagcaagaccctctttctacaagaaaacaaacacaagcacaacaagaatatgaagaggtggggaaaatggatgtggacgggatggagaaatagtcaaacaggttgctttgataagaagtgagctccctgtcagtggaggcattcaagcagaagcagctggttggctccttgggggagactgtggtagcagaggggcttccaacattcaatcgtccaccgtgtcgtgcagtgtgccattgtggagaccatagccctgaaccagacagacgaggctattccctcagtgctgatgttctagtcagggacatggccggaagcaagatgatcagatggcttcatgcagcatcccacggggatagtgatgtggagccagaaccactcagctccgtcctgtggggcagcagggcaatgactgggtctcccactaatctgggcctctctgcccacagggtcccccagccctcagcctgactccaccgacaacgatgactacgatgacatcagcgcagcctaggccggggccagccgaggctcctggggtggctctgaccctctggcctcctgctctacctactccctttcccctttcccaccctcccagctcacctccccatggagctgagaggcctcccttggagagatggaaggaaacgttataccttgtacccctcggtctccatccatcaagccaaacctgctgccacagccctcccccggccccagatagcagccccagggaggatgctgcctccaagaggtgtgagccctctgtctcggggatgaacaagcagagtctgggctacctcttgacagctggtggaggggagttggggagctggactggatgactctggaggccccttccaaacctcaagtgtccggcgctttgattgcctgagtttctgacacttcagggcccagaggtcctgcgaggggcagaactggacccccatgccagtgctgctgcaggagggcccatatactagggtctgctgagctgttgtcactgatcggtgggcgctgggggggtagggtagcacaccagctgtcccaggctttgctccgggcggtaactgcacttgggcagggaatatagccttcctgggcacaactagctgacaatgacaggttgactgtgtacccccaaccaaggagctggggcccaaggccagtcctgccccagagacactccaagtccgccaggggcacagaccagttctgcagtgactgtccctggacaatgggtctttattctgagtttcctatggtttacaaagagggccccagcccagccccaccacagatcccagagataggggcccagtctccatgggggcaaggagcatagagatgttttccaggaaggggctcagaagctgcactaggccccgagtccccatgtgtctccttgaattgatgaggatgctcctgggagggatgcgtgactatgtggtgttgcacccggggctgcaaacgtctccgtgcagcccccagagagaggcccatgggctcagaccaggctttgttgtcctgctctgagtatcctgagattaaactgaattgctgaatgaaaccagggcgtggaatgacaatttcttaaacctcatagaacccaggctgcatgtgtgtgtgcacgtgtgtgtggcatgtatgtgcatgtgtgtgtgtgtgtgtgtgtgtggcatatgttggatacaaatgagacaaagagttgagctcaaatcttttatttgggaagtaatcccagggagcagcagtaagaaaatgaggaagaaagagggggaaggaaggaagacaatgttcatgaacaggttgctattatggacagccagagctcaatggtgctggggacctctgggagacacacctcagaattgtcccaccaagggggcagggagctgggatattgacccaccctctctgcctgtcattggttgaggagacattaacccccagccccagcactaccgagcggcctgtgagtgagctgggcacacgctgtgtcgggagaagccacaggcagagggtcagaggcacatgctataaggaaccatcttccatgggaatggtccaggaaaagcaccaacagcaactgctccatgttcagagtgtgtgtgtgtgtgtgtgcatgtgtgtgtgtgcgtgtcagggagaagtcaggttgtggcaatggtgggggcaactctatctgtttaggaggaaatgctagggaactggaaaacccacggtggctcagcaccataaaaaacactggggaggccgggcaccgtggctcacgcctgtaatctcagcattttggggaggccaaggcaggaggatcactttagcccagaagttcgagaccagcctgggcaacatagtgagaccctgtctctaccgaaaaaaaaaattgaaaatcatccaggtatggtggtgcacacctgtagtcccagctacttgggaggctgaagcagggaggtcgcttgagcccaggaatttgaggctgcagtgagccatgaatgatcacatcactgcactccagcctgggtgagagtgagactctatctcaaaaacattttttaacactggggataggaaaacagaacctgacagactgagaggcagggtctatgagaactcaacctcactgcctccctgggctgctccacagcagccctgggctcagcggcaggggttactgcactgaatgagttcccgcctgagcccccaaatcttcaaaggtagtataattccagggagttttatgcttagagttgcctggaaaaggattgcaccaccccagaaggaagtggggatgaggctggtggcgctggaggggactggagcggatccgcactgagaaatcggcattgcctccagtcctctgcccattcagggctatgactttatccctgctgccatggccagtgcccagctctgcctgcggggtgagggttggggctcaggttttctccgagccgtctcgggaggggcggatcatgaaggaggtggggctgtgtggtgggcggggcctgctttccattcacctgtcccagaggtggagagaaagccgcgctccccagggcaaccgtcacaggatgtggttggcagtgttgggccccctcctcgggccctctgaaccctccccagggtggcgggggattcctaggggaggagccacttctggggtaggtggggcagactcagcggcagggggcttgtgaaagcctgtgttcaactccccactccacccctcctggcagtgtggcctcaggcaaatcactcaacatctctgagactttgtttgctgtaagttggtctgtagaatgtgtgggcagtagtgggtaactcacaggtggtggtgagggttagagggttggtagtaaatgcccccgtcattggtagattaatcactgcaggtgagagcgctccttaaaaggagaaaggggaagccaggaggcactcagcagtgcctggggtcttcagtgcgttagtgctgggggcagggcggggcaagggttggggggacatggagaatgtcttgtcccactctcattttacaggtgaggacactgagacctagggtgggaaaggacctgtccaggtcactgagagttagtaacagagtcacaattcaatccctttccccaccctcgtgccggccccagctcacacagggagatggcaatgccttctgagtcaccccgatttccccaacctccccggagctgcctctctcaccccagctctcccacccagggccccccacagtctctgaggaattgggaagctctgccctagccctgggcagtctgaagaaacagcaccacacacagtaggagggctgatcccagctggcccctgtctctatgtctcccagggactcagacctgggacctgcaccttattgagccgacatgggccaggcctgtgctgagactgggaaagctgagatgaatgacagccaggctctgacctgaaggagcaccagcctggcagggaagtcacaaacataagcaggtggcttcccctccactcctgggagacctcattataatacgcctcaaggatctgggacaggaaacacaaagaggctcaatggacttggcagcggaacccagtggttccagaaacattggcgtggggggaaaggctgtgtcccagaacggaagcacccagcaatttgactgacagctctgcaagctcaggcagagagtgatgcacagggaattcctgggaagctgatgcctgatctgggttgtagaggatgaataggagtgaaccaccgacgtggagagggaaaagcattccaggccaagggaatgacacgagcgaagacacagcaagaaactgcacggctcgcgaggtcaagggaggtccagtttgagaggagatgaggctgggggatggtcaagtctcacaccaacccccattttcatgggtgagaaaattgaggcccagagaggttaagtaaaaagccaaggtcacacagctaaataatgacagtgctgggacttaaatacagcctagcttcagagtctgagtgttaatcatggctcttccagtgtccctgtgcccaccacagccacacggctgggcattattaccagagccccagcctagaatctggagacaccggcctatctgcccaccaacagcacaggcaccggctgcattctgggatacggggttcgggaatgtagaatcatcactaccaggcacccttatagagccagctctgtgctgagctctgggaggcacagaaaggaatggagcctggcccttgccgctggggagtttacaggacctggggcagagagagaccagtaactgccgttcatcaacatggtgatgatgacggtgggtagcatttactatgtgccaggtatgtgttgtttcatacaatcctcataagggcactctgagaaggtattattctccctaattcgtaaataggggcaactgaaaccccgagagttagatgactagccagaagccacacagcttggcaggtagcacaacttttccacctcactgcaaagccccagtgtgaaaacaccacgccgcacagcgagggctcatgataagcatgtttaacccacatgaacttaagtgtgtgctcagcagcaaacagaaagacaaggggcaacccagcccaatatttcccttggttgaacaaacacccaggaggagacagacaggagctgtggagcctccgttccctcagatcctggaagccgttcatcctgtgggtacc

SEQ ID NO: 28895 - DNA, 1277 bp, Homo Sapiens
agggccctcctatggaccctgcccgctcccctcccattgtccacggctgtccgcccacccccattctccaagcttcagccccctccttagttcggcatctgcacagcactgaagaacctgggaatcagaccctgagaccctgagcaatcccaggtccagcgccagccctatcatgaccaaggagtatcaagaccttcagcatctggacaatgaggagagtgaccaccatcagctcagaaaagggccacctcctccccagcccctcctgcagcgtctctgctccggacctcgcctcctcctgctctccctgggcctcagcctcctgctgcttgtggttgtctgtgtgatcggatcccaaaactcccagctgcaggaggagctgcggggcctgagagagacgttcagcaacttcacagcgagcacggaggcccaggtcaagggcttgagcacccagggaggcaatgtgggaagaaagatgaagtcgctagagtcccagctggagaaacagcagaaggacctgagtgaagatcactccagcctgctgctccacgtgaagcagttcgtgtctgacctgcggagcctgagctgtcagatggcggcgctccagggcaatggctcagaaaggacctgctgcccggtcaactgggtggagcacgagcgcagctgctactggttctctcgctccgggaaggcctgggctgacgccgacaactactgccggctggaggacgcgcacctggtggtggtcacgtcctgggaggagcagaaatttgtccagcaccacataggccctgtgaacacctggatgggcctccacgaccaaaacgggccctggaagtgggtggacgggacggactacgagacgggcttcaagaactggaggccggagcagccggacgactggtacggccacgggctcggaggaggcgaggactgtgcccacttcaccgacgacggccgctggaacgacgacgtctgccagaggccctaccgctgggtctgcgagacagagctggacaaggccagccaggagccacctctcctttaatttatttcttcaatgcctcgacctgccgcaggggtccgggattgggaatccgcccatctggggcctcttctgctttctcgggaattttcatctaggattttaagggaaggggaaggatagggtgatgttccgaaggtgaggagcttgaaacccgtggcgctttctgcagttcacaatgataacctgcaaactgcagaaagcgccacgggtttcaagctcctcaccttcg

SEQ ID NO: 28896 - DNA, 2368 bp, Homo Sapiens
gcggacttcctcggacccggacccagccccagcccggccccagccagccccgacggcgccatgcggggtccgagcggggctctgtggctgctcctggctctgcgcaccgtgctcggaggcatggaggtgcggtggtgcgccacctcggacccagagcagcacaagtgcggcaacatgagcgaggccttccgggaagcgggcatccagccctccctcctctgcgtccggggcacctccgccgaccactgcgtccagctcatcgcggcccaggaggctgacgccatcactctggatggaggagccatctatgaggcgggaaaggagcacggcctgaagccggtggtgggcgaagtgtacgatcaagaggtcggtacctcctattacgccgtggctgtggtcaggaggagctcccatgtgaccattgacaccctgaaaggcgtgaagtcctgccacacgggcatcaatcgcacagtgggctggaacgtgcccgtgggctacctggtggagagcggccgcctctcggtgatgggctgcgatgtactcaaagctgtcagcgactattttgggggcagctgcgtcccgggggcaggagagaccagttactctgagtccctctgtcgcctctgcaggggtgacagctctggggaaggggtgtgtgacaagagccccctggagagatactacgactacagcggggccttccggtgcctggcggaaggggcaggggacgtggcttttgtgaagcacagcacggtactggagaacacggatgggaagacgcttccctcctggggccaggccctgctgtcacaggacttcgagctgctgtgccgggatggtagccgggccgatgtcaccgagtggaggcagtgccatctggcccgggtgcctgctcacgccgtggtggtccgggccgacacagatgggggcctcatcttccggctgctcaacgaaggccagcgtctgttcagccacgagggcagcagcttccagatgttcagctctgaggcctatggccagaaggatctactcttcaaagactctacctcggagcttgtgcccatcgccacacagacctatgaggcgtggctgggccatgagtacctgcacgccatgaagggtctgctctgtgaccccaaccggctgcccccctacctgcgctggtgtgtgctctccactcccgagatccagaagtgtggagacatggccgtggccttccgccggcagcgcctcaagccagagatccagtgcgtgtcagccaagtccccccaacactgcatggagcggatccaggctgagcaggtcgacgctgtgaccctaagtggcgaggacatttacacggcggggaagaagtacggcctggttcccgcagccggcgagcactatgccccggaagacagcagcaactcgtactacgtggtggccgtggtgagacgggacagctcccacgccttcaccttggatgagcttcggggcaagcgctcctgccacgccggtttcggcagccctgcaggctgggatgtccccgtgggtgcccttattcagagaggcttcatccggcccaaggactgtgacgtcctcacagcagtgagcgagttcttcaatgccagctgcgtgcccgtgaacaaccccaagaactacccctcctcgctgtgtgcactgtgcgtgggggacgagcagggccgcaacaagtgtgtgggcaacagccaggagcggtattacggctaccgcggcgccttcaggtgcctggtggagaatgcgggtgacgttgccttcgtcaggcacacaaccgtctttgacaacacaaacggccacaattccgagccctgggctgctgagctcaggtcagaggactatgaactgctgtgccccaacggggcccgagccgaggtgtcccagtttgcagcctgcaacctggcacagataccaccccacgccgtgatggtccggcccgacaccaacatcttcaccgtgtatggactgctggacaaggcccaggacctgtttggagacgaccacaataagaacgggttcaaaatgttcgactcctccaactatcatggccaagacctgcttttcaaggatgccaccgtccgggcggtgcctgtcggagagaaaaccacctaccgcggctggctggggctggactacgtggcggcgctggaagggatgtcgtctcagcagtgctcgggcgcagcggccccggcgcccggggcgcccctgctcccgctgctgctgcccgccctcgccgcccgcctgctcccgcccgccctctgagcccggccgccccgccccagagctccgatgcccgcccggggagtttccgcggcggcctctcgcgctgcggaatccagaaggaagctcgcga

SEQ ID NO: 28897 - DNA, 2051 bp, Homo Sapiens
atataatataaactaataaagatcaggaaataattaatgtataccgtaatgtagaccgactcaggtatgtaagtagagaatatgaaggtgaattagataattaaagggatggtttaacaaaatgaaggcactcattgcagcactgcttttgatcacattgcagtattcgtgtgccgtgagtcccactgactgcagtgctgttgagccggaggctgagaaagctctagacctgatcaacaaaaggcgacgggatggctaccttttccaattgctgcggattgctgatgcccacttggacagagtggaaaatacaactgtatattacttagtcttagatgtgcaagaatcggactgttcggtcctatccaggaaatactggaatgactgtgagccacctgattccagacgtccatctgaaatagtgatcggacaatgtaaggtaatagctacaagacattcccatgaatctcaggacctcagagtgattgactttaactgcaccacaagttctgtctcttcagcactggccaataccaaagatagtccggtcctcatagatttctttgaggatactgagcgctacagaaaacaagccaacaaagcccttgagaagtacaaagaggagaatgatgactttgcctctttcagagtggaccgaatcgagagagttgcaagagtgagaggaggggaaggaactggttacttcgtggacttctctgtgcggaactgccccagacaccatttccccagacaccccaatgtctttggattctgcagagcagatttgttctatgatgtagaagccttggacttggaaagcccgaaaaaccttgtcataaactgtgaagtcttcgaccctcaggaacatgagaacatcaatggtgtaccgcctcatttgggacatcccttccactggggtgggcatgagcgttcttctaccaccaagcctccattcaagccccatggatctagagatcatcatcatccccacaagccacacgaacatggacccccacctcctccagatgaaagagatcactcacatggacccccacttccacaaggccctcctccactattgcccatgtcctgctcaagttgtcaacatgccacttttggcacaaatggggcccaaagacattctcataataataattccagtgacctccatccccataagcatcattcccatgaacagcatccccacggacaccatccccatgcacaccatcctcatgaacatgatacccatagacagcatccccatggacaccacccccatggacaccatcctcatggacaccacccccatggacaccatccccatggacaccatccccactgccatgatttccaagactatggaccttgtgacccaccaccccataaccaaggtcactgttgccatggccacggcccaccacctgggcacttaagaaggcgaggcccaggtaaaggaccccgtcccttccattgcagacaaattggatctgtgtaccgactccctcctctaagaaaaggtgaggtgctgccacttcctgaggccaattttcccagcttcccattgccgcaccacaaacatcctctaaagccagacaatcagccctttcctcaatcagtctctgaatcatgtccagggaagttcaagagtgggtttccacaagtttccatgttttttacacatacatttccaaaataaaatgtgattcctttgaagaggaaaatgaataatacattgaattagaaacataaataaaatgaccagtaattgtgaaaattacagttcttttcaacctactttcatactgaagatgcagcaaaatgtgaatgggaaaagagatggcctgagaagagagatcaaatggaaaggagaggaaagaactcagtgctgcctattagtagttaattctgtcactcaccactacatcacttgagacaaatctatgccactcagaatctccttctttcctggacttaactctaattctagagtctctgttactgcttgggctatacctgggcatactaataaagtatggtattgaaactat

SEQ ID NO: 28898 - DNA, 2113 bp, Homo Sapiens
ttacccgaacaactttcaattccagtacgatgtcagctcggccgcgcagcccggctgctcagtcctcgacgaggccttccagcgctatcgtgacctgcttttcggttccgggtcttggccccgtccttacctcacagggaaacggcatacactggagaagaatgtgttggttgtctctgtagtcacacctggatgtaaccagcttcctactttggagtcagtggagaattataccctgaccataaatgatgaccagtgtttactcctctctgagactgtctggggagctctccgaggtctggagacttttagccagcttgtttggaaatctgctgagggcacattctttatcaacaagactgagattgaggactttccccgctttcctcaccggggcttgctgttggatacatctcgccattacctgccactctctagcatcctggacactctggatgtcatggcgtacaataaattgaacgtgttccactggcatctggtagatgatccttccttcccatatgagagcttcacttttccagagctcatgagaaaggggtcctacaaccctgtcacccacatctacacagcacaggatgtgaaggaggtcattgaatacgcacggctccggggtatccgtgtgcttgcagagtttgacactcctggccacactttgtcctggggaccaggtatccctggattactgactccttgctactctgggtctgagccctctggcacctttggaccagtgaatcccagtctcaataatacctatgagttcatgagcacattcttcttagaagtcagctctgtcttcccagatttttatcttcatcttggaggagatgaggttgatttcacctgctggaagtccaacccagagatccaggactttatgaggaagaaaggcttcggtgaggacttcaagcagctggagtccttctacatccagacgctgctggacatcgtctcttcttatggcaagggctatgtggtctggcaggaggtgtttgataataaagtaaagattcagccagacacaatcatacaggtgtggcgagaggatattccagtgaactatatgaaggagctggaactggtcaccaaggccggcttccgggcccttctctctgccccctggtacctgaaccgtatatcctatggccctgactggaaggatttctacgtagtggaacccctggcatttgaaggtacccctgagcagaaggctctggtgattggtggagaggcttgtatgtggggagaatatgtggacaacacaaacctggtccccaggctctggcccagagcaggggctgttgccgaaaggctgtggagcaacaagttgacatctgacctgacatttgcctatgaacgtttgtcacacttccgctgtgagttgctgaggcgaggtgtccaggcccaacccctcaatgtaggcttctgtgagcaggagtttgaacagacctgagccccaggcaccgaggagggtgctggctgtaggtgaatggtagtggagccaggcttccactgcatcctggccaggggacggagccccttgccttcgtgccccttgcctgcgtgcccctgtgcttggagagaaaggggccggtgctggcgctcgcattcaataaagagtaatgtggcatttttctataataaacatggattacctgtgtttaaaaaaaaaagtgtgaatggcgttagggtaagggcacagccaggctggagtcagtgtctgcccctgaggtcttttaagttgagggctgggaatgaaacctatagcctttgtgctgttctgccttgcctgtgagctatgtcactcccctcccactcctgaccatattccagacacctgccctaatcctcagcctgctcacttcacttctgcattatatctccaaggcgttggtatatggaaaaagatgtaggggcttggaggtgttctggacagtggggagggctccagacccaacctggtcacaaaagagcctctcccccatgcatactcatccacctccctcccctagagctattctcctttgggtttcttgctgctgcaattttatacaaccattatttaaatattattaaacacatattgttctct

SEQ ID NO: 28899 - DNA, 2139 bp, Homo Sapiens
gaaaacagtgcagccacctccgagagcctggatgtgatggcgtcacagaagagaccctcccagaggcacggatccaagtacctggccacagcaagtaccatggaccatgccaggcatggcttcctcccaaggcacagagacacgggcatccttgactccatcgggcgcttctttggcggtgacaggggtgcgccaaagcggggctctggcaaggactcacaccacccggcaagaactgctcactatggctccctgccccagaagtcacacggccggacccaagatgaaaaccccgtagtccacttcttcaagaacattgtgacgcctcgcacaccacccccgtcgcagggaaaggggagaggactgtccctgagcagatttagctggggggccgaaggccagagaccaggatttggctacggaggcagagcgtccgactataaatcggctcacaagggattcaagggagtcgatgcccagggcacgctttccaaaatttttaagctgggaggaagagatagtcgctctggatcacccatggctagacgctgaaaacccacctggttccggaatcctgtcctcagcttcttaatataactgccttaaaactttaatcccacttgcccctgttacctaattagagcagatgacccctcccctaatgcctgcggagttgtgcacgtagtagggtcaggccacggcagcctaccggcaatttccggccaacagttaaatgagaacatgaaaacagaaaacggttaaaactgtccctttctgtgtgaagatcacgttccttcccccgcaatgtgcccccagacgcacgtgggtcttcagggggccaggtgcacagacgtccctccacgttcacccctccacccttggactttcttttcgccgtggctcggcacccttgcgcttttgctggtcactgccatggaggcacacagctgcagagacagagaggacgtgggcggcagagaggactgttgacatccaagcttcctttgtttttttttcctgtccttctctcacctcctaaagtagacttcatttttcctaacaggattagacagtcaaggagtggcttactacatgtgggagctttttggtatgtgacatgcgggctgggcagctgttagagtccaacgtggggcagcacagagagggggccacctccccaggccgtggctgcccacacaccccaattagctgaattcgcgtgtggcagagggaggaaaaggaggcaaacgtgggctgggcaatggcctcacataggaaacagggtcttcctggagatttggtgatggagatgtcaagcaggtggcctctggacgtcaccgttgccctgcatggtggccccagagcagcctctatgaacaacctcgtttccaaaccacagcccacagccggagagtccaggaagacttgcgcactcagagcagaagggtaggagtcctctagacagcctcgcagccgcgccagtcgcccatagacactggctgtgaccgggcgtgctggcagcggcagtgcacagtggccagcactaaccctccctgagaagataaccggctcattcacttcctcccagaagacgcgtggtagcgagtaggcacaggcgtgcacctgctcccgaattactcaccgagacacacgggctgagcagacggcccctgtgatggagacaaagagctcttctgaccatatccttcttaacacccgctggcatctcctttcgcgcctccctccctaacctactgacccaccttttgattttagcgcacctgtgattgataggccttccaaagagtcccacgctggcatcaccctccccgaggacggagatgaggagtagtcagcgtgatgccaaaacgcgtcttcttaatccaattctaattctgaatgtttcgtgtgggcttaataccatgtctattaatatatagcctcgatgatgagagagttacaaagaacaaaactccagacacaaacctccaaatttttcagcagaagcactctgcgtcgctgagctgaggtcggctctgcgatccatacgtggccgcacccacacagcacgtgctgtgacgatggctgaacggaaagtgtacactgttcctgaatattgaaataaaacaataaactttt

SEQ ID NO: 28900 - DNA, 6893 bp, Homo Sapiens
ctccgggctgtcccagctcggcaagcgctgcccaggtcctggggtggtggcagccagcgggagcaggaaaggaagcatgttcccaggctgcccacgcctctgggtcctggtggtcttgggcaccagctgggtaggctgggggagccaagggacagaagcggcacagctaaggcagttctacgtggctgctcagggcatcagttggagctaccgacctgagcccacaaactcaagtttgaatctttctgtaacttcctttaagaaaattgtctacagagagtatgaaccatattttaagaaagaaaaaccacaatctaccatttcaggacttcttgggcctactttatatgctgaagtcggagacatcataaaagttcactttaaaaataaggcagataagcccttgagcatccatcctcaaggaattaggtacagtaaattatcagaaggtgcttcttaccttgaccacacattccctgcagagaagatggacgacgctgtggctccaggccgagaatacacctatgaatggagtatcagtgaggacagtggacccacccatgatgaccctccatgcctcacacacatctattactcccatgaaaatctgatcgaggatttcaactctgggctgattgggcccctgcttatctgtaaaaaagggaccctaactgagggtgggacacagaagacgtttgacaagcaaatcgtgctactatttgctgtgtttgatgaaagcaagagctggagccagtcatcatccctaatgtacacagtcaatggatatgtgaatgggacaatgccagatataacagtttgtgcccatgaccacatcagctggcatctgctgggaatgagctcggggccagaattattctccattcatttcaacggccaggtcctggagcagaaccatcataaggtctcagccatcacccttgtcagtgctacatccactaccgcaaatatgactgtgggcccagagggaaagtggatcatatcttctctcaccccaaaacatttgcaagctgggatgcaggcttacattgacattaaaaactgcccaaagaaaaccaggaatcttaagaaaataactcgtgagcagaggcggcacatgaagaggtgggaatacttcattgctgcagaggaagtcatttgggactatgcacctgtaataccagcgaatatggacaaaaaatacaggtctcagcatttggataatttctcaaaccaaattggaaaacattataagaaagttatgtacacacagtacgaagatgagtccttcaccaaacatacagtgaatcccaatatgaaagaagatgggattttgggtcctattatcagagcccaggtcagagacacactcaaaatcgtgttcaaaaatatggccagccgcccctatagcatttaccctcatggagtgaccttctcgccttatgaagatgaagtcaactcttctttcacctcaggcaggaacaacaccatgatcagagcagttcaaccaggggaaacctatacttataagtggaacatcttagagtttgatgaacccacagaaaatgatgcccagtgcttaacaagaccatactacagtgacgtggacatcatgagagacatcgcctctgggctaataggactacttctaatctgtaagagcagatccctggacaggcgaggaatacagagggcagcagacatcgaacagcaggctgtgtttgctgtgtttgatgagaacaaaagctggtaccttgaggacaacatcaacaagttttgtgaaaatcctgatgaggtgaaacgtgatgaccccaagttttatgaatcaaacatcatgagcactatcaatggctatgtgcctgagagcataactactcttggattctgctttgatgacactgtccagtggcacttctgtagtgtggggacccagaatgaaattttgaccatccacttcactgggcactcattcatctatggaaagaggcatgaggacaccttgaccctcttccccatgcgtggagaatctgtgacggtcacaatggataatgttggaacttggatgttaacttccatgaattctagtccaagaagcaaaaagctgaggctgaaattcagggatgttaaatgtatcccagatgatgatgaagactcatatgagatttttgaacctccagaatctacagtcatggctacacggaaaatgcatgatcgtttagaacctgaagatgaagagagtgatgctgactatgattaccagaacagactggctgcagcattaggaattaggtcattccgaaactcatcattgaaccaggaagaagaagagttcaatcttactgccctagctctggagaatggcactgaattcgtttcttcgaacacagatataattgttggttcaaattattcttccccaagtaatattagtaagttcactgtcaataaccttgcagaacctcagaaagccccttctcaccaacaagccaccacagctggttccccactgagacacctcattggcaagaactcagttctcaattcttccacagcagagcattccagcccatattctgaagaccctatagaggatcctctacagccagatgtcacagggatacgtctactttcacttggtgctggagaattcagaagtcaagaacatgctaagcgtaagggacccaaggtagaaagagatcaagcagcaaagcacaggttctcctggatgaaattactagcacataaagttgggagacacctaagccaagacactggttctccttccggaatgaggccctgggaggaccttcctagccaagacactggttctccttccagaatgaggccctgggaggaccctcctagtgatctgttactcttaaaacaaagtaactcatctaagattttggttgggagatggcatttggcttctgagaaaggtagctatgaaataatccaagatactgatgaagacacagctgttaacaattggctgatcagcccccagaatgcctcacgtgcttggggagaaagcacccctcttgccaacaagcctggaaagcagagtggccacccaaagtttcctagagttagacataaatctctacaagtaagacaggatggaggaaagagtagactgaagaaaagccagtttctcattaagacacgaaaaaagaaaaaagagaagcacacacaccatgctcctttatctccgaggacctttcaccctctaagaagtgaagcctacaacacattttcagaaagaagacttaagcattcgttggtgcttcataaatccaatgaaacatctcttcccacagacctcaatcagacattgccctctatggattttggctggatagcctcacttcctgaccataatcagaattcctcaaatgacactggtcaggcaagctgtcctccaggtctttatcagacagtgcccccagaggaacactatcaaacattccccattcaagaccctgatcaaatgcactctacttcagaccccagtcacagatcctcttctccagagctcagtgaaatgcttgagtatgaccgaagtcacaagtccttccccacagatataagtcaaatgtccccttcctcagaacatgaagtctggcagacagtcatctctccagacctcagccaggtgaccctctctccagaactcagccagacaaacctctctccagacctcagccacacgactctctctccagaactcattcagagaaacctttccccagccctcggtcagatgcccatttctccagacctcagccatacaaccctttctccagacctcagccatacaaccctttctttagacctcagccagacaaacctctctccagaactcagtcagacaaacctttctccagccctcggtcagatgcccctttctccagacctcagccatacaaccatttctctagacttcagccagacaaacctctctccagaactcagccatatgactctctctccagaactcagtcagacaaacctttccccagccctcggtcagatgcccatttctccagacctcagccatacaaccctttctctagacttcagccagacaaacctctctccagaactcagtcaaacaaacctttccccagccctcggtcagatgcccctttctccagaccccagccatacaaccctttctctagacctcagccagacaaacctctctccagaactcagtcagacaaacctttccccagacctcagtgagatgcccctctttgcagatctcagtcaaattccccttaccccagacctcgaccagatgacactttctccagaccttggtgagacagatctttccccaaactttggtcagatgtccctttccccagacctcagccaggtgactctctctccagacatcagtgacaccacccttctcccggatctcagccagatatcacctcctccagaccttgatcagatattctacccttctgaatctagtcagtcattgcttcttcaagaatttaatgagtcttttccttatccagaccttggtcagatgccatctccttcatctcctactctcaatgatacttttctatcaaaggaatttaatccactggttatagtgggcctcagtaaagatggtacagattacattgagatcattccaaaggaagaggtccagagcagtgaagatgactatgctgaaattgattatgtgccctatgatgacccctacaaaactgatgttaggacaaacatcaactcctccagagatcctgacaacattgcagcatggtacctccgcagcaacaatggaaacagaagaaattattacattgctgctgaagaaatatcctgggattattcagaatttgtacaaagggaaacagatattgaagactctgatgatattccagaagataccacatataagaaagtagtttttcgaaagtacctcgacagcacttttaccaaacgtgatcctcgaggggagtatgaagagcatctcggaattcttggtcctattatcagagctgaagtggatgatgttatccaagttcgttttaaaaatttagcatccagaccgtattctctacatgcccatggactttcctatgaaaaatcatcagagggaaagacttatgaagatgactctcctgaatggtttaaggaagataatgctgttcagccaaatagcagttatacctacgtatggcatgccactgagcgatcagggccagaaagtcctggctctgcctgtcgggcttgggcctactactcagctgtgaacccagaaaaagatattcactcaggcttgataggtcccctcctaatctgccaaaaaggaatactacataaggacagcaacatgcctgtggacatgagagaatttgtcttactatttatgacctttgatgaaaagaagagctggtactatgaaaagaagtcccgaagttcttggagactcacatcctcagaaatgaaaaaatcccatgagtttcacgccattaatgggatgatctacagcttgcctggcctgaaaatgtatgagcaagagtgggtgaggttacacctgctgaacataggcggctcccaagacattcacgtggttcactttcacggccagaccttgctggaaaatggcaataaacagcaccagttaggggtctggccccttctgcctggttcatttaaaactcttgaaatgaaggcatcaaaacctggctggtggctcctaaacacagaggttggagaaaaccagagagcagggatgcaaacgccatttcttatcatggacagagactgtaggatgccaatgggactaagcactggtatcatatctgattcacagatcaaggcttcagagtttctgggttactgggagcccagattagcaagattaaacaatggtggatcttataatgcttggagtgtagaaaaacttgcagcagaatttgcctctaaaccttggatccaggtggacatgcaaaaggaagtcataatcacagggatccagacccaaggtgccaaacactacctgaagtcctgctataccacagagttctatgtagcttacagttccaaccagatcaactggcagatcttcaaagggaacagcacaaggaatgtgatgtattttaatggcaattcagatgcctctacaataaaagagaatcagtttgacccacctattgtggctagatatattaggatctctccaactcgagcctataacagacctacccttcgattggaactgcaaggttgtgaggtaaatggatgttccacacccctgggtatggaaaatggaaagatagaaaacaagcaaatcacagcttcttcgtttaagaaatcttggtggggagattactgggaacccttccgtgcccgtctgaatgcccagggacgtgtgaatgcctggcaagccaaggcaaacaacaataagcagtggctagaaattgatctactcaagatcaagaagataacggcaattataacacagggctgcaagtctctgtcctctgaaatgtatgtaaagagctataccatccactacagtgagcagggagtggaatggaaaccatacaggctgaaatcctccatggtggacaagatttttgaaggaaatactaataccaaaggacatgtgaagaactttttcaaccccccaatcatttccaggtttatccgtgtcattcctaaaacatggaatcaaagtattgcacttcgcctggaactctttggctgtgatatttactagaattgaacattcaaaaacccctggaagagactctttaagacctcaaaccatttagaatgggcaatgtattttacgctgtgttaaatgttaacagttttccactatttctctttcttttctattagtgaataaaattttatac

SEQ ID NO: 28901 - DNA, 1510 bp, Homo Sapiens
acccctaagatgagctttccatgtaaatttgtagccagcttccttctgattttcaatgtttcttccaaaggtgcagtctccaaagagattacgaatgccttggaaacctggggtgccttgggtcaggacatcaacttggacattcctagttttcaaatgagtgatgatattgacgatataaaatgggaaaaaacttcagacaagaaaaagattgcacaattcagaaaagagaaagagactttcaaggaaaaagatacatataagctatttaaaaatggaactctgaaaattaagcatctgaagaccgatgatcaggatatctacaaggtatcaatatatgatacaaaaggaaaaaatgtgttggaaaaaatatttgatttgaagattcaagagagggtctcaaaaccaaagatctcctggacttgtatcaacacaaccctgacctgtgaggtaatgaatggaactgaccccgaattaaacctgtatcaagatgggaaacatctaaaactttctcagagggtcatcacacacaagtggaccaccagcctgagtgcaaaattcaagtgcacagcagggaacaaagtcagcaaggaatccagtgtcgagcctgtcagctgtccagagaaaggtctggacatctatctcatcattggcatatgtggaggaggcagcctcttgatggtctttgtggcactgctcgttttctatatcaccaaaaggaaaaaacagaggagtcggagaaatgatgaggagctggagacaagagcccacagagtagctactgaagaaaggggccggaagccccaccaaattccagcttcaacccctcagaatccagcaacttcccaacatcctcctccaccacctggtcatcgttcccaggcacctagtcatcgtcccccgcctcctggacaccgtgttcagcaccagcctcagaagaggcctcctgctccgtcgggcacacaagttcaccagcagaaaggcccgcccctccccagacctcgagttcagccaaaacctccccatggggcagcagaaaactcattgtccccttcctctaattaaaaaagatagaaactgtatttttcaataaaaagcactgtggatttctgccctcctgatgtgcatatccgtacttccatgaggtgttttctgtgtgcagaacattgtcacctcctgaggctgtgggccacagccacctctgcatcttcgaactcagccatgtggtcaacatctggagtttttggtctcctcagagagctccatcacaccagtaaggagaagcaatataagtgtgattgcaagaatggtagaggaccgagcacagaaatcttagagatttcctgtcccctctcaggtcatgtgtagatgcgataaatcaagtgattggtgtgcctgggtctcactacaagcagcctatctgcttaagagactctggagtttcttatgtgccctggtggacacttgcccaccatcctgtgagtaaaagtgaaataaaagctttgactag

SEQ ID NO: 28902 - DNA, 4646 bp, Homo Sapiens
cctactctattcagatattctccagattcctaaagattagagatcatttctcattctcctaggagtactcacttcaggaagcaaccagataaaagagaggtgcaacggaagccagaacattcctcctggaaattcaacctgtttcgcagtttctcgaggaatcagcattcagtcaatccgggccgggagcagtcatctgtggtgaggctgattggctgggcaggaacagcgccggggcgtgggctgagcacagcgcttcgctctctttgccacaggaagcctgagctcattcgagtagcggctcttccaagctcaaagaagcagaggccgctgttcgtttcctttaggtctttccactaaagtcggagtatcttcttccaagatttcacgtcttggtggccgttccaaggagcgcgaggtcgggatggatcttgaaggggaccgcaatggaggagcaaagaagaagaacttttttaaactgaacaataaaagtgaaaaagataagaaggaaaagaaaccaactgtcagtgtattttcaatgtttcgctattcaaattggcttgacaagttgtatatggtggtgggaactttggctgccatcatccatggggctggacttcctctcatgatgctggtgtttggagaaatgacagatatctttgcaaatgcaggaaatttagaagatctgatgtcaaacatcactaatagaagtgatatcaatgatacagggttcttcatgaatctggaggaagacatgaccaggtatgcctattattacagtggaattggtgctggggtgctggttgctgcttacattcaggtttcattttggtgcctggcagctggaagacaaatacacaaaattagaaaacagttttttcatgctataatgcgacaggagataggctggtttgatgtgcacgatgttggggagcttaacacccgacttacagatgatgtctctaagattaatgaagttattggtgacaaaattggaatgttctttcagtcaatggcaacatttttcactgggtttatagtaggatttacacgtggttggaagctaacccttgtgattttggccatcagtcctgttcttggactgtcagctgctgtctgggcaaagatactatcttcatttactgataaagaactcttagcgtatgcaaaagctggagcagtagctgaagaggtcttggcagcaattagaactgtgattgcatttggaggacaaaagaaagaacttgaaaggtacaacaaaaatttagaagaagctaaaagaattgggataaagaaagctattacagccaatatttctataggtgctgctttcctgctgatctatgcatcttatgctctggccttctggtatgggaccaccttggtcctctcaggggaatattctattggacaagtactcactgtattcttttctgtattaattggggcttttagtgttggacaggcatctccaagcattgaagcatttgcaaatgcaagaggagcagcttatgaaatcttcaagataattgataataagccaagtattgacagctattcgaagagtgggcacaaaccagataatattaagggaaatttggaattcagaaatgttcacttcagttacccatctcgaaaagaagttaagatcttgaagggcctgaacctgaaggtgcagagtgggcagacggtggccctggttggaaacagtggctgtgggaagagcacaacagtccagctgatgcagaggctctatgaccccacagaggggatggtcagtgttgatggacaggatattaggaccataaatgtaaggtttctacgggaaatcattggtgtggtgagtcaggaacctgtattgtttgccaccacgatagctgaaaacattcgctatggccgtgaaaatgtcaccatggatgagattgagaaagctgtcaaggaagccaatgcctatgactttatcatgaaactgcctcataaatttgacaccctggttggagagagaggggcccagttgagtggtgggcagaagcagaggatcgccattgcacgtgccctggttcgcaaccccaagatcctcctgctggatgaggccacgtcagccttggacacagaaagcgaagcagtggttcaggtggctctggataaggccagaaaaggtcggaccaccattgtgatagctcatcgtttgtctacagttcgtaatgctgacgtcatcgctggtttcgatgatggagtcattgtggagaaaggaaatcatgatgaactcatgaaagagaaaggcatttacttcaaacttgtcacaatgcagacagcaggaaatgaagttgaattagaaaatgcagctgatgaatccaaaagtgaaattgatgccttggaaatgtcttcaaatgattcaagatccagtctaataagaaaaagatcaactcgtaggagtgtccgtggatcacaagcccaagacagaaagcttagtaccaaagaggctctggatgaaagtatacctccagtttccttttggaggattatgaagctaaatttaactgaatggccttattttgttgttggtgtattttgtgccattataaatggaggcctgcaaccagcatttgcaataatattttcaaagattataggggtttttacaagaattgatgatcctgaaacaaaacgacagaatagtaacttgttttcactattgtttctagcccttggaattatttcttttattacatttttccttcagggtttcacatttggcaaagctggagagatcctcaccaagcggctccgatacatggttttccgatccatgctcagacaggatgtgagttggtttgatgaccctaaaaacaccactggagcattgactaccaggctcgccaatgatgctgctcaagttaaaggggctataggttccaggcttgctgtaattacccagaatatagcaaatcttgggacaggaataattatatccttcatctatggttggcaactaacactgttactcttagcaattgtacccatcattgcaatagcaggagttgttgaaatgaaaatgttgtctggacaagcactgaaagataagaaagaactagaaggtgctgggaagatcgctactgaagcaatagaaaacttccgaaccgttgtttctttgactcaggagcagaagtttgaacatatgtatgctcagagtttgcaggtaccatacagaaactctttgaggaaagcacacatctttggaattacattttccttcacccaggcaatgatgtatttttcctatgctggatgtttccggtttggagcctacttggtggcacataaactcatgagctttgaggatgttctgttagtattttcagctgttgtctttggtgccatggccgtggggcaagtcagttcatttgctcctgactatgccaaagccaaaatatcagcagcccacatcatcatgatcattgaaaaaacccctttgattgacagctacagcacggaaggcctaatgccgaacacattggaaggaaatgtcacatttggtgaagttgtattcaactatcccacccgaccggacatcccagtgcttcagggactgagcctggaggtgaagaagggccagacgctggctctggtgggcagcagtggctgtgggaagagcacagtggtccagctcctggagcggttctacgaccccttggcagggaaagtgctgcttgatggcaaagaaataaagcgactgaatgttcagtggctccgagcacacctgggcatcgtgtcccaggagcccatcctgtttgactgcagcattgctgagaacattgcctatggagacaacagccgggtggtgtcacaggaagagatcgtgagggcagcaaaggaggccaacatacatgccttcatcgagtcactgcctaataaatatagcactaaagtaggagacaaaggaactcagctctctggtggccagaaacaacgcattgccatagctcgtgcccttgttagacagcctcatattttgcttttggatgaagccacgtcagctctggatacagaaagtgaaaaggttgtccaagaagccctggacaaagccagagaaggccgcacctgcattgtgattgctcaccgcctgtccaccatccagaatgcagacttaatagtggtgtttcagaatggcagagtcaaggagcatggcacgcatcagcagctgctggcacagaaaggcatctatttttcaatggtcagtgtccaggctggaacaaagcgccagtgaactctgactgtatgagatgttaaatactttttaatatttgtttagatatgacatttattcaaagttaaaagcaaacacttacagaattatgaagaggtatctgtttaacatttcctcagtcaagttcagagtcttcagagacttcgtaattaaaggaacagagtgagagacatcatcaagtggagagaaatcatagtttaaactgcattataaattttataacagaattaaagtagattttaaaagataaaatgtgtaattttgtttatattttcccatttggactgtaactgactgccttgctaaaagattatagaagtagcaaaaagtattgaaatgtttgcataaagtgtctataataaaactaaactttcatgtg

SEQ ID NO: 28903 - DNA, 2191 bp, Homo Sapiens
ggtggccgagcgggggaccgggaagcatggcccgggggtcggcggttgcctgggcggcgctcgggccgttgttgtggggctgcgcgctggggctgcagggcgggatgctgtacccccaggagagcccgtcgcgggagtgcaaggagctggacggcctctggagcttccgcgccgacttctctgacaaccgacgccggggcttcgaggagcagtggtaccggcggccgctgtgggagtcaggccccaccgtggacatgccagttccctccagcttcaatgacatcagccaggactggcgtctgcggcattttgtcggctgggtgtggtacgaacgggaggtgatcctgccggagcgatggacccaggacctgcgcacaagagtggtgctgaggattggcagtgcccattcctatgccatcgtgtgggtgaatggggtcgacacgctagagcatgaggggggctacctccccttcgaggccgacatcagcaacctggtccaggtggggcccctgccctcccggctccgaatcactatcgccatcaacaacacactcacccccaccaccctgccaccagggaccatccaatacctgactgacacctccaagtatcccaagggttactttgtccagaacacatattttgactttttcaactacgctggactgcagcggtctgtacttctgtacacgacacccaccacctacatcgatgacatcaccgtcaccaccagcgtggagcaagacagtgggctggtgaattaccagatctctgtcaagggcagtaacctgttcaagttggaagtgcgtcttttggatgcagaaaacaaagtcgtggcgaatgggactgggacccagggccaacttaaggtgccaggtgtcagcctctggtggccgtacctgatgcacgaacgccctgcctatctgtattcattggaggtgcagctgactgcacagacgtcactggggcctgtgtctgacttctacacactccctgtggggatccgcactgtggctgtcaccaagagccagttcctcatcaatgggaaacctttctatttccacggtgtcaacaagcatgaggatgcggacatccgagggaagggcttcgactggccgctgctggtgaaggacttcaacctgcttcgctggcttggtgccaacgctttccgtaccagccactacccctatgcagaggaagtgatgcagatgtgtgaccgctatgggattgtggtcatcgatgagtgtcccggcgtgggcctggcgctgccgcagttcttcaacaacgtttctctgcatcaccacatgcaggtgatggaagaagtggtgcgtagggacaagaaccaccccgcggtcgtgatgtggtctgtggccaacgagcctgcgtcccacctagaatctgctggctactacttgaagatggtgatcgctcacaccaaatccttggacccctcccggcctgtgacctttgtgagcaactctaactatgcagcagacaagggggctccgtatgtggatgtgatctgtttgaacagctactactcttggtatcacgactacgggcacctggagttgattcagctgcagctggccacccagtttgagaactggtataagaagtatcagaagcccattattcagagcgagtatggagcagaaacgattgcagggtttcaccaggatccacctctgatgttcactgaagagtaccagaaaagtctgctagagcagtaccatctgggtctggatcaaaaacgcagaaaatatgtggttggagagctcatttggaattttgccgatttcatgactgaacagtcaccgacgagagtgctggggaataaaaaggggatcttcactcggcagagacaaccaaaaagtgcagcgttccttttgcgagagagatactggaagattgccaatgaaaccaggtatccccactcagtagccaagtcacaatgtttggaaaacagcccgtttacttgagcaagactgataccacctgcgtgtcccttcctccccgagtcagggcgacttccacagcagcagaacaagtgcctcctggactgttcacggcagaccagaacgtttctggcctgggttttgtggtcatctattctagcagggaacactaaaggtggaaataaaagattttctattatggaaataaagagttggcatgaaagtcgctactg

SEQ ID NO: 28904 - DNA, 2776 bp, Homo Sapiens
cagggcagactggtagcaaagcccccacgcccagccaggagcaccgccgcggactccagcacaccgagggacatgctgggcctgcgccccccactgctcgccctggtggggctgctctccctcgggtgcgtcctctctcaggagtgcacgaagttcaaggtcagcagctgccgggaatgcatcgagtcggggcccggctgcacctggtgccagaagctgaacttcacagggccgggggatcctgactccattcgctgcgacacccggccacagctgctcatgaggggctgtgcggctgacgacatcatggaccccacaagcctcgctgaaacccaggaagaccacaatgggggccagaagcagctgtccccacaaaaagtgacgctttacctgcgaccaggccaggcagcagcgttcaacgtgaccttccggcgggccaagggctaccccatcgacctgtactatctgatggacctctcctactccatgcttgatgacctcaggaatgtcaagaagctaggtggcgacctgctccgggccctcaacgagatcaccgagtccggccgcattggcttcgggtccttcgtggacaagaccgtgctgccgttcgtgaacacgcaccctgataagctgcgaaacccatgccccaacaaggagaaagagtgccagcccccgtttgccttcaggcacgtgctgaagctgaccaacaactccaaccagtttcagaccgaggtcgggaagcagctgatttccggaaacctggatgcacccgagggtgggctggacgccatgatgcaggtcgccgcctgcccggaggaaatcggctggcgcaacgtcacgcggctgctggtgtttgccactgatgacggcttccatttcgcgggcgacggaaagctgggcgccatcctgacccccaacgacggccgctgtcacctggaggacaacttgtacaagaggagcaacgaattcgactacccatcggtgggccagctggcgcacaagctggctgaaaacaacatccagcccatcttcgcggtgaccagtaggatggtgaagacctacgagaaactcaccgagatcatccccaagtcagccgtgggggagctgtctgaggactccagcaatgtggtccatctcattaagaatgcttacaataaactctcctccagggtcttcctggatcacaacgccctccccgacaccctgaaagtcacctacgactccttctgcagcaatggagtgacgcacaggaaccagcccagaggtgactgtgatggcgtgcagatcaatgtcccgatcaccttccaggtgaaggtcacggccacagagtgcatccaggagcagtcgtttgtcatccgggcgctgggcttcacggacatagtgaccgtgcaggttcttccccagtgtgagtgccggtgccgggaccagagcagagaccgcagcctctgccatggcaagggcttcttggagtgcggcatctgcaggtgtgacactggctacattgggaaaaactgtgagtgccagacacagggccggagcagccaggagctggaaggaagctgccggaaggacaacaactccatcatctgctcagggctgggggactgtgtctgcgggcagtgcctgtgccacaccagcgacgtccccggcaagctgatatacgggcagtactgcgagtgtgacaccatcaactgtgagcgctacaacggccaggtctgcggcggcccggggagggggctctgcttctgcgggaagtgccgctgccacccgggctttgagggctcagcgtgccagtgcgagaggaccactgagggctgcctgaacccgcggcgtgttgagtgtagtggtcgtggccggtgccgctgcaacgtatgcgagtgccattcaggctaccagctgcctctgtgccaggagtgccccggctgcccctcaccctgtggcaagtacatctcctgcgccgagtgcctgaagttcgaaaagggcccctttgggaagaactgcagcgcggcgtgtccgggcctgcagctgtcgaacaaccccgtgaagggcaggacctgcaaggagagggactcagagggctgctgggtggcctacacgctggagcagcaggacgggatggaccgctacctcatctatgtggatgagagccgagagtgtgtggcaggccccaacatcgccgccatcgtcgggggcaccgtggcaggcatcgtgctgatcggcattctcctgctggtcatctggaaggctctgatccacctgagcgacctccgggagtacaggcgctttgagaaggagaagctcaagtcccagtggaacaatgataatccccttttcaagagcgccaccacgacggtcatgaaccccaagtttgctgagagttaggagcacttggtgaagacaaggccgtcaggacccaccatgtctgccccatcacgcggccgagacatggcttggccacagctcttgaggatgtcaccaattaaccagaaatccagttattttccgccctcaaaatgacagccatggccggccggtgcttctgggggctcgtcggggggacagctccactctgactggcacagtctttgcatggagacttgaggagggcttgaggttggtgaggttaggtgcgtgtttcctgtgcaagtcaggacatcagtctgattaaaggtggtgccaatttatttacatttaaacttgtcagggtataaaatgacatcccattaattatattgttaatcaatcacgtgtatagaaaaaaaaataaaacttcaat

SEQ ID NO: 28905 - DNA, 3549 bp, Homo Sapiens
cccctcttcctcctcctcaagggaaagctgcccacttctagctgccctgccatcccctttaaagggcgacttgctcagcgccaaaccgcggctccagccctctccagcctccggctcagccggctcatcagtcggtccgcgccttgcagctcctccagagggacgcgccccgagatggagagcaaagccctgctcgtgctgactctggccgtgtggctccagagtctgaccgcctcccgcggaggggtggccgccgccgaccaaagaagagattttatcgacatcgaaagtaaatttgccctaaggacccctgaagacacagctgaggacacttgccacctcattcccggagtagcagagtccgtggctacctgtcatttcaatcacagcagcaaaaccttcatggtgatccatggctggacggtaacaggaatgtatgagagttgggtgccaaaacttgtggccgccctgtacaagagagaaccagactccaatgtcattgtggtggactggctgtcacgggctcaggagcattacccagtgtccgcgggctacaccaaactggtgggacaggatgtggcccggtttatcaactggatggaggaggagtttaactaccctctggacaatgtccatctcttgggatacagccttggagcccatgctgctggcattgcaggaagtctgaccaataagaaagtcaacagaattactggcctcgatccagctggacctaactttgagtatgcagaagccccgagtcgtctttctcctgatgatgcagattttgtagacgtcttacacacattcaccagagggtcccctggtcgaagcattggaatccagaaaccagttgggcatgttgacatttacccgaatggaggtacttttcagccaggatgtaacattggagaagctatccgcgtgattgcagagagaggacttggagatgtggaccagctagtgaagtgctcccacgagcgctccattcatctcttcatcgactctctgttgaatgaagaaaatccaagtaaggcctacaggtgcagttccaaggaagcctttgagaaagggctctgcttgagttgtagaaagaaccgctgcaacaatctgggctatgagatcaataaagtcagagccaaaagaagcagcaaaatgtacctgaagactcgttctcagatgccctacaaagtcttccattaccaagtaaagattcatttttctgggactgagagtgaaacccataccaatcaggcctttgagatttctctgtatggcaccgtggccgagagtgagaacatcccattcactctgcctgaagtttccacaaataagacctactccttcctaatttacacagaggtagatattggagaactactcatgttgaagctcaaatggaagagtgattcatactttagctggtcagactggtggagcagtcccggcttcgccattcagaagatcagagtaaaagcaggagagactcagaaaaaggtgatcttctgttctagggagaaagtgtctcatttgcagaaaggaaaggcacctgcggtatttgtgaaatgccatgacaagtctctgaataagaagtcaggctgaaactgggcgaatctacagaacaaagaacggcatgtgaattctgtgaagaatgaagtggaggaagtaacttttacaaaacatacccagtgtttggggtgtttcaaaagtggattttcctgaatattaatcccagccctacccttgttagttattttaggagacagtctcaagcactaaaaagtggctaattcaatttatggggtatagtggccaaatagcacatcctccaacgttaaaagacagtggatcatgaaaagtgctgttttgtcctttgagaaagaaataattgtttgagcgcagagtaaaataaggctccttcatgtggcgtattgggccatagcctataattggttagaacctcctattttaattggaattctggatctttcggactgaggccttctcaaactttactctaagtctccaagaatacagaaaatgcttttccgcggcacgaatcagactcatctacacagcagtatgaatgatgttttagaatgattccctcttgctattggaatgtggtccagacgtcaaccaggaacatgtaacttggagagggacgaagaaagggtctgataaacacagaggttttaaacagtccctaccattggcctgcatcatgacaaagttacaaattcaaggagatataaaatctagatcaattaattcttaataggctttatcgtttattgcttaatccctctctcccccttcttttttgtctcaagattatattataataatgttctctgggtaggtgttgaaaatgagcctgtaatcctcagctgacacataatttgaatggtgcagaaaaaaaaaagataccgtaattttattattagattctccaaatgattttcatcaatttaaaatcattcaatatctgacagttactcttcagttttaggcttaccttggtcatgcttcagttgtacttccagtgcgtctcttttgttcctggctttgacatgaaaagataggtttgagttcaaattttgcattgtgtgagcttctacagattttagacaaggaccgtttttactaagtaaaagggtggagaggttcctggggtggattcctaagcagtgcttgtaaaccatcgcgtgcaatgagccagatggagtaccatgagggttgttatttgttgtttttaacaactaatcaagagtgagtgaacaactatttataaactagatctcctatttttcagaatgctcttctacgtataaatatgaaatgataaagatgtcaaatatctcagaggctatagctgggaacccgactgtgaaagtatgtgatatctgaacacatactagaaagctctgcatgtgtgttgtccttcagcataattcggaagggaaaacagtcgatcaagggatgtattggaacatgtcggagtagaaattgttcctgatgtgccagaacttcgaccctttctctgagagagatgatcgtgcctataaatagtaggaccaatgttgtgattaacatcatcaggcttggaatgaattctctctaaaaataaaatgatgtatgatttgttgttggcatcccctttattaattcattaaatttctggatttgggttgtgacccagggtgcattaacttaaaagattcactaaagcagcacatagcactgggaactctggctccgaaaaactttgttatatatatcaaggatgttctggctttacattttatttattagctgtaaatacatgtgtggatgtgtaaatggagcttgtacatattggaaaggtcattgtggctatctgcatttataaatgtgtggtgctaactgtatgtgtctttatcagtgatggtctcacagagccaactcactcttatgaaatgggctttaacaaaacaagaaagaaacgtacttaactgtgtgaagaaatggaatcagcttttaataaaattgacaacattttattaccac

SEQ ID NO: 28906 - DNA, 1504 bp, Homo Sapiens
cctaagatgagctttccatgtaaatttgtagccagcttccttctgattttcaatgtttcttccaaaggtgcagtctccaaagagattacgaatgccttggaaacctggggtgccttgggtcaggacatcaacttggacattcctagttttcaaatgagtgatgatattgacgatataaaatgggaaaaaacttcagacaagaaaaagattgcacaattcagaaaagagaaagagactttcaaggaaaaagatacatataagctatttaaaaatggaactctgaaaattaagcatctgaagaccgatgatcaggatatctacaaggtatcaatatatgatacaaaaggaaaaaatgtgttggaaaaaatatttgatttgaagattcaagagagggtctcaaaaccaaagatctcctggacttgtatcaacacaaccctgacctgtgaggtaatgaatggaactgaccccgaattaaacctgtatcaagatgggaaacatctaaaactttctcagagggtcatcacacacaagtggaccaccagcctgagtgcaaaattcaagtgcacagcagggaacaaagtcagcaaggaatccagtgtcgagcctgtcagctgtccagagaaaggtctggacatctatctcatcattggcatatgtggaggaggcagcctcttgatggtctttgtggcactgctcgttttctatatcaccaaaaggaaaaaacagaggagtcggagaaatgatgaggagctggagacaagagcccacagagtagctactgaagaaaggggccggaagccccaacaaattccagcttcaacccctcagaatccagcaacttcccaacatcctcctccaccacctggtcatcgttcccaggcacctagtcatcgtcccccgcctcctggacaccgtgttcagcaccagcctcagaagaggcctcctgctccgtcgggcacacaagttcaccagcagaaaggcccgcccctccccagacctcgagttcagccaaaacctccccatggggcagcagaaaactcattgtccccttcctctaattaaaaaagatagaaactgtctttttcaataaaaagcactgtggatttctgccctcctgatgtgcatatccgtacttccatgaggtgttttctgtgtgcagaacattgtcacctcctgaggctgtgggccacagccacctctgcatcttcgaactcagccatgtggtcaacatctggagtttttggtctcctcagagagctccatcacaccagtaaggagaagcaatataagtgtgattgcaagaatggtagaggaccgagcacagaaatcttagagatttcttgtcccctctcaggtcatgtgtagatgcgataaatcaagtgattggtgtgcctgggtctcactacaagcagcctatctgcttaagagactctggagtttcttatgtgccctggtggacacttgcccaccatcctgtgagtaaaagtgaaataaaagctttgac

SEQ ID NO: 28907 - DNA, 6520 bp, Homo Sapiens
  misc_feature (2520)..(2520): n is a, c, g, or t
acagtgctgttggccaagcctccagcagctgacgggacccagctgtagtgaggttgcagtgattgagtaggattggcctgcttcaaagcagaggtttctcatgggaatatgcttattaaactcccactggtgcagaaaccatgaacagaggatgaacaagtgaagttgcaatctcctccatcacagctcagttccccaacaacaggatcacaagctggagatgcctttaaggaagatgaagatccctttcctcctactgttctttctgtgggaagccgagagccacgaagcatcaaggccgaacatcatcctggtgatggctgacgacctcggcattggagatcctgggtgctatgggaacaaaactatcaggactcccaatatcgaccggttggccagtgggggagtgaaactcactcagcacctggcagcatcaccgctgtgcacaccaagcagggcagccttcatgactggccggtaccctgtccgatcaggaatggcatcttggtcccgcactggagttttcctcttcacagcctcttcgggaggacttcccaccgatgagattacctttgctaagcttctgaaggatcaaggttattcaacagcactgatagggaaatggcaccttgggatgagctgtcacagcaagactgacttctgtcaccaccctttacatcacggcttcaattatttctatgggatctctttgaccaatctgagagactgcaagcccggagagggcagtgtcttcaccacgggcttcaagaggctggtcttcctccccctgcagatcgtcggggtcaccctccttacccttgctgcactcaattgtctggggctactccacgtgcctctaggcgtttttttcagccttctcttcctagcagccctaatcctgacccttttcttgggcttccttcattacttccggcccctgaactgcttcatgatgaggaactacgagatcattcagcagcccatgtcctatgacaatctcacccagaggctaacggtggaggcggcccagttcatacagcggaacactgagactccgttcctgcttgtcttgtcctacctccacgtgcacacagccctgttctccagcaaagactttgctggcaaaagtcaacacggagtctacggggatgctgttgaggaaatggactggagtgtggggcagatcttgaaccttctggatgagctgagattggctaatgataccctcatctacttcacatcggaccagggagcacatgtagaagaagtgtcttccaaaggagaaattcatggcggaagtaatgggatctataaaggaggaaaagcaaacaactgggaaggaggtatccgggttccaggcatccttcgttggcccagggtgatacaggctggccagaagattgatgagcccactagcaacatggacatatttcctacagtagccaagctggctggagctcccttgcctgaggacaggatcattgatggacgtgatctgatgcccctgcttgaaggaaaaagccaacgctccgatcatgagtttctcttccattactgcaacgcctacttaaatgctgtgcgctggcaccctcagaacagcacatccatctggaaggcctttttcttcacccccaacttcaaccccgtgggttccaacggatgctttgccacacacgtgtgcttctgtttcgggagttatgtcacccatcacgacccacctttactctttgatatttccaaagatcccagagagagaaacccacttactccagcatccgagccccggttttatgaaatcctcaaagtcatgcaggaagctgcggacagacacacccagaccctgccagaggtgcccgatcagttttcatggaacaactttctttggaagccctggcttcagctgtgctgtccttccaccggcctgtcttgccagtgtgatagagaaaaacaggataagagactgagccgctagcagcgcctggggaccagacagacgcatgtggcaaagctcaccatcttcactacaaacacgcctgagagtggcactggggaaacataactccatctacaccttggatttggactgattctccattttatcacctgaaggcttgggccagagctcaacagctactcaactggaggggtgagggggataaggtctgtagtatacagacaggaagatggtaggtttatgccttctgtggccagagtcttggactcatggaaatagaatgaatagaggggcattcacaaggcacaccagtgcaagcagatgacaaaaaggtgcagaaggcaatcttaaaacagaaaggtgcaggaggtaccttaactcacccctcagcaaatacctatgtcaacagtataagttaccatttactctataatctgcagtgatgcaataaccagcataataaaaaggcaatcacataaaaaagagtttagtcgtctaaacataagtaactttaaggtgaatgaaagatcttctttaggaataatagatgatggtaagttccactntggttattggaaggcaagtcattattattggtattagttaaaacacatatcaaatgcttgctcttcatcatatatatagttatgcatacatacacacacacacatacagtatattctttcctcaaaagggttaagatgtctaaaatagggacctagaagcttaacactatttaagtaaatacagtagaagctcacaaatagatttctttgcacaatgattttttgcaaaattttacagtaataataatcccaaggcaaatctctcctgaactgctttccattccataatttgtagtataattcttggattccactgttttctttggggaatggaagttctgaattaaaagcccactgtggagatgctgtggttcatggaatctcttccagtgtaattcagaatcatggcctagaaagtctctgatatttggaggggaacaaaaatcactcacaagcaatccatgatctatacacataagcataatttcctttagttctagttagtcatcagagaacagtcatgtatgcaagttttgtgactgagaaatttctgtgcttccaatccacaatgagatgcatgattttgttttcatcccatttcccccaagcccctgtaaatcagggaaaatgcgcaactgatcgcctaggagagggcctcgtagtggcacagctggagatagtttcaaagtctaaaccaccagcccatcctgaggaaagcctcctatggaatgtaaagtgcaatcatttcttcagatataagactttccccaacaatgtgattggattcctttatgctcaaaatcgagagaagctgccatccacctgcttatgcatttatctcttttgtggacttgtctgaccaccttctatttgcccagagtttgctcaattccaagacagtgcccatgaatgggacacctgtaatgtaacccacacagcggtttgcagagaatgttagccatgacttgggctttgtaaagttggctataatttctctatccctacccacaaccctgggaagttggagcaagaggggcatactattgggctgggaggatttgacagcatttccccagttgccctttaagttcttctatttcaaacgttaattttgcttctctttctaaaaaaaaaaaaaaaaaagaaagagaagaaagaagtgattcctacccctacctccagagttgttgaaagctgaaaagcatacaagattcttccttttaacttggatttctcgttccagaaattgtgggataatctgtattcttgctttagaaaacaattcttagagagggtactagcttactgatgatgtgttaggattgctactgatgctgtcatgtggaaactatttaaaggcactattataaatttatcctataagatgacaatgtttactcaaagtctaacatattcaatgcaagtaagactttctgaaaacacttgatgatgtggaaatgctgcaggacctaaataacttgaagagcctttatagattatatgaatgcctatttgtgtctagaaccagttatttaacctgtaaaatgtcaatagcaaatgaaggatgaagtatatctctagatgcaaatacattgagtttaaaagtgcctcaaaataattgagatcacatttcaggacatttggaaatcaggtcgatttgtggtaactgtagtcatcttaaatttcaaaccatttaccatctgaaagttttgatttgaatgtaaaacaggaaattggaattcctttgtccaggagaaacctcacaaaccttctttaaggcatagttttgttgtttgtttgcttgtttgttgcaggctgtaaggcatggctgcttgtttacaaagcatctcattcatattacctgtggagttgcatatccaaaccttagtgagttttgaagctttaagcaaattcttttaaaaaattcttgtatttctagcattactagatattaaaagttaagcaaatagattaatgacgtatacataggcatcatttcacaaggtcagtaatgctgcaggaaaagcaaaattgcaatctacgtatctatggtactaaggaagtcctgttttcaaaaatggaagcccacttctcagatttttctgaagggcatacaatgaaaagtgaaggggaaacacacacacacaaaaaaaacaagtatttggcttgtcacaggaatctgattgcattaagtgaaggattatttagaatatgttaatgcaaagctaaaataaaattttccttggcaattaaaaatgctgtgcgctaataccctgctttctatcgtgactcaattcaacaatgtggggaatgtttactacatttccaacttgatgtcaagcaatggggaatacaagttccagttctgcaaagattcgtcaactttcttagctcaagagagaggctgagaaatgcagagaagaataagacataaaatagctccgacctccatgatccgagagtgggaaaaggcccgattattacccataaggcacactctctaaggccttttaaggggcctacaaaaatgttttattttataatcagaagaaaaggaaatgaacattggggattgaaaatcatattggtatttgcaccaacatagtcataaaatagtatgttaatatgtttttactttatatatttatatattaaaatatatttaatatgttttgcctttgtggcccatgaaagtcttactgggccctggggaaggtatcctaccctggtgaagcagctgctttgctctacaaatacctggggcagaaatttgatttgaaaagtattattctctcttctctttgtttcaactggattcctttggaaaaccaaactagtatcagaacaaaccccgaaacagtaagaaattggagtgagaagggcatggtattgggactaggatcggctctcattcgatcgagctattctcttaaaatgacaaaaagtgtccataaagaggctgctggagagtgcgtggccatagggagccgacatgcccgggaggaaaggtgttgattacatggatacttctaaaagctaaagccttgttgccttctctttaatgcctagagaatgggatgtgtgatgcaaatgctcaaaacctcttaaatcatagctgtctgacctctacggacctcacatccatctgaggcttcatggacaaagattctccacttggccaaactttagccaagctcctcaaccttctcccaggcccaatctgggcacttccttgtaaaatctagttttggcaagaagtctattaggtcagtttagcaagaacacctaacccccccatatctgttcaacctcagtatctgatcaggctcctcagcctccaccatcccccaggtgatgtctggtcaactggcctaccttcagctagaatcctgttaggtcggtttagatgaatgctccctgatatttcctcttggtaatcttccatccactgcccatgaccctgttccctgtctataaatccccagttttccatggtatattcagagctgagtccagtctctctcccctactacaagtccccattgctgtggtccccgtacctgtcatgatggtcctaaataaagtcttactgtgctttaataggtagcattgaaaaatttttttctttgacatcattcatgacaacatgaaacctattgggacagcatgactgtgcagggtctttagagctcagctttctgaggccctgagcattcttggttttccgacatcgtgaacctgttctgtgttgcaagatatcactcaagccagtgttgcttaataccatctctttgtgtaatagatctgaataaagtaattgtaatacaccaatattttactttgttgagtattattttaatgggagcctttccaatgaaggaaacatcagctttccttgttagaatgcaagcagcttaaaaactacccatgtctttctggaaaggaaacattgccatgtaactatgtatcagttttctaagaacttcatgggccttccata

SEQ ID NO: 28908 - DNA, 2397 bp, Homo Sapiens
ttttttttttcatcctactttgttttattgggcgttgattgttacaggtcccagcctgtagacatcttttactccaatttcctgaatagatagctttattccttcaaggtaatatagtgcggtggcttctggctgagatgtttgctgttgttttcttcatcttgtctttgatgacttgtcagcctggggtaactgcacaggagaaggtgaaccagagagtaagacgggcagctacacccgcagcagttacctgccagctgagcaactggtcagagtggacagattgctttccgtgccaggacaaaaagtaccgacaccggagcctcttgcagccaaacaagtttgggggaaccatctgcagtggtgacatctgggatcaagccagctgctccagttctacaacttgtgtaaggcaagcacagtgtggacaggatttccagtgtaaggagacaggtcgctgcctgaaacgccaccttgtgtgtaatggagaccaggactgccttgatggctctgatgaggacgactgtgaagatgtcagggccattgacgaagactgcagccagtatgaaccaattccaggatcacagaaggcagccttggggtacaatatcctgacccaggaagatgctcagagtgtgtacgatgccagttattatgggggccagtgtgagacggtatacaatggggaatggagggagcttcgatatgactccacctgtgaacgtctctactatggagatgatgagaaatactttcggaaaccctacaactttctgaagtaccactttgaagccctggcagatactggaatctcctcagagttttatgataatgcaaatgaccttctttccaaagttaaaaaagacaagtctgactcatttggagtgaccatcggcataggcccagccggcagccctttattggtgggtgtaggtgtatcccactcacaagacacttcattcttgaacgaattaaacaagtataatgagaagaaattcattttcacaagaatcttcacaaaggtgcagactgcacattttaagatgaggaaggatgacattatgctggatgaaggaatgctgcagtcattaatggagcttccagatcagtacaattatggcatgtatgccaagttcatcaatgactatggcacccattacatcacatctggatccatgggtggcatttatgaatatatcctggtgattgacaaagcaaaaatggaatcccttggtattaccagcagagatatcacgacatgttttggaggctccttgggcattcaatatgaagacaaaataaatgttggtggaggtttatcaggagaccattgtaaaaaatttggaggtggcaaaactgaaagggccaggaaggccatggctgtggaagacattatttctcgggtgcgaggtggcagttctggctggagcggtggcttggcacagaacaggagcaccattacataccgttcctgggggaggtcattaaagtataatcctgttgttatcgattttgagatgcagcctatccacgaggtgctgcggcacacaagcctggggcctctggaggccaagcgccagaacctgcgccgcgccttggaccagtatctgatggaattcaatgcctgccgatgtgggccttgcttcaacaatggggtgcccatcctcgagggcaccagctgcaggtgccagtgccgcctgggtagcttgggtgctgcctgtgagcaaacacagacagaaggagccaaagcagatgggagctggagttgctggagctcctggtctgtatgcagagcaggcatccaggaaaggagaagagagtgtgacaatccagcacctcagaatggaggggcctcgtgtccagggcggaaagtacagacgcaggcttgctgagggcctctggacacaggctggaccagatgctgtggatgtcgacccctgcactgactattggataaagacttctttcaactaagagaagatgcaaatcagcacacttttttctttgttctgccagcttccaggcctaagactaggttttgctgtctacagccaactattctattagttacaaaactcaatcattttattcagcaactggatgttgactgttaactagaagctctgtcctacttacagcactttggatcatcaaaaaaataaagtaaaatagaaaactgagaaaactcaatccatgaccagggagaacttacaggatgttagagacaaaacaagcagacacctgaaacaatcaacgcccaataaaacaaagtaggatgaaaattctcttagttctttgataacaatttgttcactcatagaaacattattaattggtagggtaagcagacactctgaaacaatgagaaaaatactaaaaattgacttgagttatttc

SEQ ID NO: 28909 - DNA, 623 bp, Homo Sapiens
gaccaccagttctaagggaccatacagagtattcctctcttcacaccaggaccagccactgttgcagcatgagttcccagcagcagaagcagccctgcatcccaccccctcagcttcagcagcagcaggtgaaacagccttgccagcctccacctcaggaaccatgcatccccaaaaccaaggagccctgccaccccaaggtgcctgagccctgccaccccaaagtgcctgagccctgccagcccaaggttccagagccatgccaccccaaggtgcctgagccctgcccttcaatagtcactccagcaccagcccagcagaagaccaagcagaagtaatgtggtccacagccatgcccttgaggagccggccaccagatgctgaatcccctatcccattctgtgtatgagtcccatttgccttgcaattagcattctgtctcccccaaaaaagaatgtgctatgaagctttctttcctacacactctgagtctctgaatgaagctgaaggtcttagtaccagagctagttttcagctgctcagaattcatctgaagagagacttaagatgaaagcaaatgattcagctcccttatacccccattaaattcactttcaattcca

SEQ ID NO: 28910 - DNA, 5778 bp, Homo Sapiens
ggcagagcagtccctactggcttacagacaagggacttggcaccagctcctttgagcagggtgatatgatcagagcaggctttaagaagctaaatggggtggccagggataggaggaattggaagaagagagatgagggtccaggatatcaggtgggagactgttcccatgacctgaactaggggcccagagatgagaatggaagataaaatacagtttcaagataatgctaccaaaccagaaccaaaagggctggatggaggtcagggaggaaaaagcagagggataagcagaggtatggagctagtggatgaatgaatgatggttccagtaacagaaaaaggaaactgtgaagaagcgtgtttagggagatgaggagagaggatcaagagagatggtagctgtgaaaactatcatcaaatggtttcaaaatggggctgttgctattgtatgcagagaaggaagatggggagaagatgatcctaattatgattatgagtatgaagatttttgttttggtagtcttgcatttaaaatgccagtatctatggagaattgccctcaggaagcaggagggcagaactagcttcaaaagactagttgattagagatccaggtatgggagtcaattgcacagaaatttcgatgggctccttagaagaggaggagcccaccaaaggagagaccaagaatcgaagtgggaacctctggtaatggggaatagggagaggtatgtcccttatgtccatcgaaacccttttatttagttaatttcattttcctcttgaaattctagcaagtgttactaatttggatataagggaatgaatttcagttttctttcttctcctttaatgtatctgataagagatattatgtaccgagaagaacaaagaagtgaaacatgaaaaggagcaaaagtaaaaggtttagatttgctgccaactgaatattcagtccgctaagagttgaccggacatttatcgcaagaccattaacagatctggtaatggtcaaaaccccagatatgccattgcctcctttgcatggtcagctggagaactggagcaaacagaaacattcttcaaagaaaccaaagagaaaagaatttggtgatttccttcttggtatctcaccaaagagctgtctatttccagctgaataaaagcacagtatggaggagaagaatgtgttgccttaaaacagattagaaaagcagtgtgtagccatatgcacaaaggccaaaagaaaccacacactgtgatggaaagaaggcagatggtgagcttctcttgccactctcattcattctttctttcattcattctccttaaattttttgagtacctactacatgccagacacggcaactggccctggaaatattgaaatgcaaattgtgcagcttgcaaagccctctcagggagacagacaagttaatgattatccacaaccctaggagaggtgatagggttatgcacaaactgctgtggaatacaagggatggagtgcccagatacacaagtggatgagacacggctccaccctcgagtacctcacagtcggggtgagacaataaaaatggctttgaaggaggtctgagagaggtaaaaccgcgtgaaagcacaaaagacaaagtccttgaccacaaggagacagaaataactcatgatttacacaaattttgtgagaacctacttcatcctaacaactactctgggagatagtgttttttgcccacctccgatcaatgggaacgctaaggctctgggaaattaaatgggtttcttctgctaacaagtagtggagtaggaatccaaacacgattttctaacccccagacccaatgcagagttcttgtcattacactgatttagtaggagagaacacacacactcacactcacatgaacacacacatatgcacatacaattacgctattctgaagtgcagaatggcaaaagatcatttttgattggagtgatctgagaaggcttcgaggactaggtcgtatctgtgtggaaacggagcagaatgacccataagagtgggaaggagagatgggagaaaggatagaattggaagtttgtagagcactcttacaggagatatttctgatcctaccaggaagatctatggaagctttacagaggagctgacgtttgctacacatctacaagtatgcataggagctccgcggaggccagtgagaggccctccaggagcagaactaattccacaattacttgaccaagttgggggattatttgtggggtaactgcagtgcagtatggagtcctcttggggacagttagagccataccatttgatctatagtcacataagaacaaacaataaaaagaaaagacatgcttaagagtgaaagagaaagggagggagaaaagaaggaagggtggatggaaggacactagcttagtaaggggtcaactttggattctatttctggttcagttttcatttgtgacttcagtgctttagtgttagttcattttctgtgaatcagtttccttatatgtgaaataaatatgataaatcctaattgaactcacagactcatgagaagatagaagtgaacacattttaaaaacatcacacaaagaggaactattatgtggtccacatttatatatgtggggtagcgtctgaagaggtgcctggactaagatggtcccagagccacaaggtttttgccaaacatgacgctttgtgaattcataacaagggctccaagtcaccagatcttagagctgacccagtgcactgtctgaaagggggtaccagttctgaggcttcaagacatgtccccagcagatcttccccgtgccttcccagaggattcaaaactgttgagcaggacggcaccatcacatcaaggcacaagtgccagggagaggtgttaaactctccccaccaacctccctggtacacacatggacacttgccacctccctcagccgccttaagcttcagagaactcaaaggactctgtaagtgatgtctccaagctcatatcgaactactgggcaaaatttcaggggctctgtcacttcctggagaagctcggatggggtgaccacacatccatactgcctgagtcagccccgggttacgcctgttgtcccggtataaccattgctagcacaccctttccctctcagaagtgccccggtttgaatgaaacctcttcgtgatccccttggaggtcaactctgagggacccagaaactgccttttgactgcatttagtactccatgaagtcaccctcatttctttttcattccaggtgcatagcgtaatgtccatgttgttctacactctgatcacagcttttctgatcggcatacaggcggaaccacactcagagagcaatgtccctgcaggacacaccatcccccaagtccactggactaaacttcagcattcccttgacactgcccttcgcagagcccgcagcgccccggcagcggcgatagctgcacgcgtggcggggcagacccgcaacattactgtggaccccaggctgtttaaaaagcggcgactccgttcaccccgtgtgctgtttagcacccagcctccccgtgaagctgcagacactcaggatctggacttcgaggtcggtggtgctgcccccttcaacaggactcacaggagcaagcggtcatcatcccatcccatcttccacaggggcgaattctcggtgtgtgacagtgtcagcgtgtgggttggggataagaccaccgccacagacatcaagggcaaggaggtgatggtgttgggagaggtgaacattaacaacagtgtattcaaacagtacttttttgagaccaagtgccgggacccaaatcccgttgacagcgggtgccggggcattgactcaaagcactggaactcatattgtaccacgactcacacctttgtcaaggcgctgaccatggatggcaagcaggctgcctggcggtttatccggatagatacggcctgtgtgtgtgtgctcagcaggaaggctgtgagaagagcctgacctgccgacacgctccctccccctgccccttctacactctcctgggcccctccctacctcaacctgtaaattattttaaattataaggactgcatggtaatttatagtttatacagttttaaagaatcattatttattaaatttttggaagcatcctgtgtgctgatgctggttattttttttgagtaaaatcatctgcaagtctgaggaagatgcagggggaattgtctgaagcaccccctggctccttctaaggcccacctgtaacccttaccccacccccagccagtgctgcaacttcaggaaaggctaactggtttcagatattagcctaagccaggcatgattagcaaaggaagcctgctggattgcaactttgttctacattccagagccaaagctacctaatcattggattacctgcccacggcctggaagcatgggccctggctcctcccttggagaagttagtggagcctcatcaggaggcagatcaccactgggcatggggctgccctggcctcagaggcacagtctcagtcctgggggcactcgatagacaggaagaggcttgtaccaaagatctgtgagctgctcatttgtagagggagtgtgctgtctggagagttgtaacagagtaactcacgaagcctgccaaagtaagatctagggtttcatgttcagctggccttagtactcgttttatccctcagcagcctcctgcagaaagactttcattaccccaagaaaacattagtgcctccgacactcttgcaacccactaacagccacagtagcaacttccaggggccccaccatcagcccacagccagggaagccagagacgggagagaacttctgaaaatatttttattcttaattggatgatttccataagtgaccaaaggtgactggggccgtgggacctgcagagaagagggtggggcagaaagactaagtaaatggagtaagaaccaaataaacctggagatgtggaggacaggtgggccggcaggaaccacggctttctgcttctcccaaacaggggaaatgaaacaaggatgacaaagagaaggccagaggtggatgtgaagaaggggaggggaggacagagcaggaggaggagggaggtgtgatctctcatctttaccagcactctccagcctccaggaaagttagcaacctgggtggttcttgtggggctttttggatgtgctaataaacactgactccatccagagcatcttaggagtgaaggtgacagagggactccagggttcagcctgcagcagggctccacccagcctcacacgacccccttcccctgcaactttcattttgtattttccttgaagccacaatattcccccagacagagcacttatattaagacagaaaatttcccctcctatccatcctgtctccccccgaggatgaaatgcctacactggttttcaagagaacaggcccaaattgtccatccgagaaaagagcaaatggtcttattcattccctctgtaatcctcgctgtccggccccacctccaacgccatccaaatagggcaaattagaaacgtagggagctttggcatgagagccatttgattagggtagaagtatgatgaaatgtgccctgttttttctatcagagccactgcaattggaataaaggtttatgctcaagaaacaccagctagaacattctgtgctgagattctaagtgagataaaggcat

SEQ ID NO: 28911 - DNA, 3337 bp, Homo Sapiens
ccggctcgaagcgcaacgaggaagcgtttgcggtgatcccggcgactgcgctggctaatgcggtaccggctagcgtggcttctgcaccccgcactgcccagcaccttccgctcagtcctcggcgcccgcctgccgcctccggagcgcctgtgtggtttccaaaaaaagacttacagcaaaatgaataatccagccatcaagagaataggaaatcacattaccaagtctcctgaagacaagcgagaatatcgagggctagagctggccaatggtatcaaagtacttcttatgagtgatcccaccacggataagtcatcagcagcacttgatgtgcacataggttcattgtcggatcctccaaatattgctggcttaagtcatttttgtgaacatatgctttttttgggaacaaagaaataccctaaagaaaatgaatacagccagtttctcagtgagcatgcaggaagttcaaatgcctttactagtggagagcataccaattactattttgatgtttctcatgaacacctagaaggtgccctagacaggtttgcacagttttttctgtgccccttgttcgatgaaagttgcaaagacagagaggtgaatgcagttgattcagaacatgagaagaatgtgatgaatgatgcctggagactctttcaattggaaaaagctacagggaatcctaaacaccccttcagtaaatttgggacaggtaacaaatatactctggagactagaccaaaccaagaaggcattgatgtaagacaagagctactgaaattccattctgcttactattcatccaacttaatggctgtttgtgttttaggtcgagaatctttagatgacttgactaatctggtggtaaagttattttctgaagtagagaacaaaaatgttccattgccagaatttcctgaacaccctttccaagaagaacatcttaaacaactttacaaaatagtacccattaaagatattaggaatctctatgtgacatttcccatacctgaccttcagaaatactacaaatcaaatcctggtcattatcttggtcatctcattgggcatgaaggtcctggaagtctgttatcagaacttaagtcaaagggctgggttaatactcttgttggtgggcagaaggaaggagcccgaggttttatgttttttatcattaatgtggacttgaccgaggaaggattattacatgttgaagatataattttgcacatgtttcaatacattcagaagttacgtgcagaaggacctcaagaatgggttttccaagagtgcaaggacttgaatgctgttgcttttaggtttaaagacaaagagaggccacggggctatacatctaagattgcaggaatattgcattattatcccctagaagaggtgctcacagcggaatatttactggaagaatttagacctgacttaatagagatggttctcgataaactcagaccagaaaatgtccgggttgccatagtttctaaatcttttgaaggaaaaactgatcgcacagaagagtggtatggaacccagtacaaacaagaagctataccggatgaagtcatcaagaaatggcaaaatgctgacctgaatgggaaatttaaacttcctacaaagaatgaatttattcctacgaattttgagattttaccgttagaaaaagaggcgacaccataccctgctcttattaaggatacagtcatgagcaaactttggttcaaacaagatgataagaaaaaaaagccgaaggcttgtctcaactttgaatttttcagcccatttgcttatgtggaccccttgcactgtaacatggcctatttgtaccttgagctcctcaaagactcactcaacgagtatgcatatgcagcagagctagcaggcttgagctatgatctccaaaataccatctatgggatgtatctttcagtgaaaggttacaatgacaagcagccaattttactaaagaagattattgagaaaatggctacctttgagattgatgaaaaaagatttgaaattatcaaagaagcatatatgcgatctcttaacaatttccgggctgaacagcctcaccagcatgccatgtactacctccgcttgctgatgactgaagtggcctggactaaagatgagttaaaagaagctctggatgatgtaacccttcctcgccttaaggccttcatacctcagctcctgtcacggctgcacattgaagcccttctccatggaaacataacaaagcaggctgcattaggaattatgcagatggttgaagacaccctcattgaacatgctcataccaaacctctccttccaagtcagctggttcggtatagagaagttcagctccctgacagaggatggtttgtttatcagcagagaaatgaagttcacaataactgtggcatcgagatatactaccaaacagacatgcaaagcacctcagagaatatgtttctggagctcttctgtcagattatctcggaaccttgcttcaacaccctgcgcaccaaggagcagttgggctatatcgtcttcagcgggccacgtcgagctaatggcatacagagcttgagattcatcatccagtcagaaaagccacctcactacctagaaagcagagtggaagctttcttaattaccatggaaaagtccatagaggacatgacagaagaggccttccaaaaacacattcaggcattagcaattcgtcgactagacaaaccaaagaagctatctgctgagtgtgctaaatactggggagaaatcatctcccagcaatataattttgacagagataacactgaggttgcatatttaaagacacttaccaaggaagatatcatcaaattctacaaggaaatgttggcagtagatgctccaaggagacataaggtatccgtccatgttcttgccagggaaatggattcttgtcctgttgttggagagttcccatgtcaaaatgacataaatttgtcacaagcaccagccttgccacaacctgaagtgattcagaacatgaccgaattcaagcgtggtctgccactgtttccccttgtgaaaccacatattaacttcatggctgcaaaactctgaagattccccatgcatgggaaagtgcaagtggatgcattcctgagtcttccagagcctaagaaaatcatcttggccactttaatagtttctgattcactattagagaaacaaacaaaaaattgtcaaatgtcattatgtagaaatattataaatccaaagtaaattacaaaatcttatagatgtagaatattttttaaatacatgccctcttaaatatttc

SEQ ID NO: 28912 - DNA, 6378 bp, Homo Sapiens
cccattactgttggagctacagggagagaaacaggaggagactgcaagagatcatttgggaaggccgtgggcacgctctttactccatgtgtgggacattcattgcggaataacatcggaggagaagtttcccagagctatggggacttcccatccggcgttcctggtcttaggctgtcttctcacagggctgagcctaatcctctgccagctttcattaccctctatccttccaaatgaaaatgaaaaggttgtgcagctgaattcatccttttctctgagatgctttggggagagtgaagtgagctggcagtaccccatgtctgaagaagagagctccgatgtggaaatcagaaatgaagaaaacaacagcggcctttttgtgacggtcttggaagtgagcagtgcctcggcggcccacacagggttgtacacttgctattacaaccacactcagacagaagagaatgagcttgaaggcaggcacatttacatctatgtgccagacccagatgtagcctttgtacctctaggaatgacggattatttagtcatcgtggaggatgatgattctgccattataccttgtcgcacaactgatcccgagactcctgtaaccttacacaacagtgagggggtggtacctgcctcctacgacagcagacagggctttaatgggaccttcactgtagggccctatatctgtgaggccaccgtcaaaggaaagaagttccagaccatcccatttaatgtttatgctttaaaagcaacatcagagctggatctagaaatggaagctcttaaaaccgtgtataagtcaggggaaacgattgtggtcacctgtgctgtttttaacaatgaggtggttgaccttcaatggacttaccctggagaagtgaaaggcaaaggcatcacaatgctggaagaaatcaaagtcccatccatcaaattggtgtacactttgacggtccccgaggccacggtgaaagacagtggagattacgaatgtgctgcccgccaggctaccagggaggtcaaagaaatgaagaaagtcactatttctgtccatgagaaaggtttcattgaaatcaaacccaccttcagccagttggaagctgtcaacctgcatgaagtcaaacattttgttgtagaggtgcgggcctacccacctcccaggatatcctggctgaaaaacaatctgactctgattgaaaatctcactgagatcaccactgatgtggaaaagattcaggaaataaggtatcgaagcaaattaaagctgatccgtgctaaggaagaagacagtggccattatactattgtagctcaaaatgaagatgctgtgaagagctatacttttgaactgttaactcaagttccttcatccattctggacttggtcgatgatcaccatggctcaactgggggacagacggtgaggtgcacagctgaaggcacgccgcttcctgatattgagtggatgatatgcaaagatattaagaaatgtaataatgaaacttcctggactattttggccaacaatgtctcaaacatcatcacggagatccactcccgagacaggagtaccgtggagggccgtgtgactttcgccaaagtggaggagaccatcgccgtgcgatgcctggctaagaatctccttggagctgagaaccgagagctgaagctggtggctcccaccctgcgttctgaactcacggtggctgctgcagtcctggtgctgttggtgattgtgatcatctcacttattgtcctggttgtcatttggaaacagaaaccgaggtatgaaattcgctggagggtcattgaatcaatcagcccggatggacatgaatatatttatgtggacccgatgcagctgccttatgactcaagatgggagtttccaagagatggactagtgcttggtcgggtcttggggtctggagcgtttgggaaggtggttgaaggaacagcctatggattaagccggtcccaacctgtcatgaaagttgcagtgaagatgctaaaacccacggccagatccagtgaaaaacaagctctcatgtctgaactgaagataatgactcacctggggccacatttgaacattgtaaacttgctgggagcctgcaccaagtcaggccccatttacatcatcacagagtattgcttctatggagatttggtcaactatttgcataagaatagggatagcttcctgagccaccacccagagaagccaaagaaagagctggatatctttggattgaaccctgctgatgaaagcacacggagctatgttattttatcttttgaaaacaatggtgactacatggacatgaagcaggctgatactacacagtatgtccccatgctagaaaggaaagaggtttctaaatattccgacatccagagatcactctatgatcgtccagcctcatataagaagaaatctatgttagactcagaagtcaaaaacctcctttcagatgataactcagaaggccttactttattggatttgttgagcttcacctatcaagttgcccgaggaatggagtttttggcttcaaaaaattgtgtccaccgtgatctggctgctcgcaacgtcctcctggcacaaggaaaaattgtgaagatctgtgactttggcctggccagagacatcatgcatgattcgaactatgtgtcgaaaggcagtacctttctgcccgtgaagtggatggctcctgagagcatctttgacaacctctacaccacactgagtgatgtctggtcttatggcattctgctctgggagatcttttcccttggtggcaccccttaccccggcatgatggtggattctactttctacaataagatcaagagtgggtaccggatggccaagcctgaccacgctaccagtgaagtctacgagatcatggtgaaatgctggaacagtgagccggagaagagaccctccttttaccacctgagtgagattgtggagaatctgctgcctggacaatataaaaagagttatgaaaaaattcacctggacttcctgaagagtgaccatcctgctgtggcacgcatgcgtgtggactcagacaatgcatacattggtgtcacctacaaaaacgaggaagacaagctgaaggactgggagggtggtctggatgagcagagactgagcgctgacagtggctacatcattcctctgcctgacattgaccctgtccctgaggaggaggacctgggcaagaggaacagacacagctcgcagacctctgaagagagtgccattgagacgggttccagcagttccaccttcatcaagagagaggacgagaccattgaagacatcgacatgatggacgacatcggcatagactcttcagacctggtggaagacagcttcctgtaactggcggattcgaggggttccttccacttctggggccacctctggatcccgttcagaaaaccactttattgcaatgcggaggttgagaggaggacttggttgatgtttaaagagaagttcccagccaagggcctcggggagcgttctaaatatgaatgaatgggatattttgaaatgaactttgtcagtgttgcctctcgcaatgcctcagtagcatctcagtggtgtgtgaagtttggagatagatggataagggaataataggccacagaaggtgaactttgtgcttcaaggacattggtgagagtccaacagacacaatttatactgcgacagaacttcagcattgtaattatgtaaataactctaaccaaggctgtgtttagattgtattaactatcttctttggacttctgaagagaccactcaatccatccatgtacttccctcttgaaacctgatgtcagctgctgttgaactttttaaagaagtgcatgaaaaaccatttttgaaccttaaaaggtactggtactatagcattttgctatcttttttagtgttaagagataaagaataataattaaccaaccttgtttaatagatttgggtcatttagaagcctgacaactcattttcatattgtaatctatgtttataatactactactgttatcagtaatgctaaatgtgtaataatgtaacatgatttccctccagagaaagcacaatttaaaacaatccttactaagtaggtgatgagtttgacagtttttgacatttatattaaataacatgtttctctataaagtatggtaatagctttagtgaattaaatttagttgagcatagagaacaaagtaaaagtagtgttgtccaggaagtcagaatttttaactgtactgaataggttccccaatccatcgtattaaaaaacaattaactgccctctgaaataatgggattagaaacaaacaaaactcttaagtcctaaaagttctcaatgtagaggcataaacctgtgctgaacataacttctcatgtatattacccaatggaaaatataatgatcagcaaaaagactggatttgcagaagttttttttttttttcttcatgcctgatgaaagctttggcaaccccaatatatgtattttttgaatctatgaacctgaaaagggtcagaaggatgcccagacatcagcctccttctttcaccccttaccccaaagagaaagagtttgaaactcgagaccataaagatattctttagtggaggctggatgtgcattagcctggatcctcagttctcaaatgtgtgtggcagccaggatgactagatcctgggtttccatccttgagattctgaagtatgaagtctgagggaaaccagagtctgtatttttctaaactccctggctgttctgatcggccagttttcggaaacactgacttaggtttcaggaagttgccatgggaaacaaataatttgaactttggaacagggttggaattcaaccacgcaggaagcctactatttaaatccttggcttcaggttagtgacatttaatgccatctagctagcaattgcgaccttaatttaactttccagtcttagctgaggctgagaaagctaaagtttggttttgacaggttttccaaaagtaaagatgctacttcccactgtatgggggagattgaactttccccgtctcccgtcttctgcctcccactccataccccgccaaggaaaggcatgtacaaaaattatgcaattcagtgttccaagtctctgtgtaaccagctcagtgttttggtggaaaaaacattttaagttttactgataatttgaggttagatgggaggatgaattgtcacatctatccacactgtcaaacaggttggtgtgggttcattggcattctttgcaatactgcttaattgctgataccatatgaatgaaacatgggctgtgattactgcaatcactgtgctatcggcagatgatgctttggaagatgcagaagcaataataaagtacttgactacctactggtgtaatctcaatgcaagccccaactttcttatccaactttttcatagtaagtgcgaagactgagccagattggccaattaaaaacgaaaacctgactaggttctgtagagccaattagacttgaaatacgtttgtgtttctagaatcacagctcaagcattctgtttatcgctcactctcccttgtacagccttattttgttggtgctttgcattttgatattgctgtgagccttgcatgacatcatgaggccggatgaaacttctcagtccagcagtttccagtcctaacaaatgctcccacctgaatttgtatatgactgcatttgtgggtgtgtgtgtgttttcagcaaattccagatttgtttccttttggcctcctgcaaagtctccagaagaaaatttgccaatctttcctactttctatttttatgatgacaatcaaagccggcctgagaaacactatttgtgactttttaaacgattagtgatgtccttaaaatgtggtctgccaatctgtacaaaatggtcctatttttgtgaagagggacataagataaaatgatgttatacatcaatatgtatatatgtatttctatatagacttggagaatactgccaaaacatttatgacaagctgtatcactgccttcgtttatatttttttaactgtgataatccccacaggcacattaactgttgcacttttgaatgtccaaaatttatattttagaaataataaaaagaaagatacttacatgttcccaaaacaatggtgtggtgaatgtgtgagaaaaactaacttgatagggtctaccaatacaaaatgtattacgaatgcccctgttcatgtttttgttttaaaacgtgtaaatgaagatctttatatttcaataaatgatatataatttaaagtt

SEQ ID NO: 28913 - DNA, 2966 bp, Homo Sapiens
gaacacgtggaggcaaacaggaaggtgaagaagaacttatcctatcaggacggaaggtcctgtgctcgggatcttccagacgtcgcgactctaaattgccccctctgaggtcaaggaacacaagatggttttggaaatgctgaacccgatacattataacatcaccagcatcgtgcctgaagccatgcctgctgccaccatgccagtcctgctcctcactggcctttttctcttggtgtggaattatgagggcacatcctcaataccaggtcctggctactgcatgggaattggacccctcatctcccacggcagattcctgtggatggggatcggcagtgcctgcaactactacaaccgggtatatggagaattcatgcgagtctggatctctggagaggaaacactcattatcagcaagtcctcaagtatgttccacataatgaagcacaatcattacagctctcgattcggcagcaaacttgggctgcagtgcatcggtatgcatgagaaaggcatcatatttaacaacaatccagagctctggaaaacaactcgacccttctttatgaaagctctgtcaggccccggccttgttcgtatggtcacagtctgtgctgaatccctcaaaacacatctggacaggttggaggaggtgaccaatgaatcgggctatgtggacgtgttgacccttctgcgtcgtgtcatgctggacacctctaacacgctcttcttgaggatccctttggacgaaagtgctatcgtggttaaaatccaaggttattttgatgcatggcaagctctcctcatcaaaccagacatcttctttaagatttcttggctatacaaaaagtatgagaagtctgtcaaggatttgaaagatgccatagaagttctgatagcagaaaaaagacgcaggatttccacagaagagaaactggaagaatgtatggactttgccactgagttgattttagcagagaaacgtggtgacctgacaagagagaatgtgaaccagtgcatattggaaatgctgatcgcagctcctgacaccatgtctgtctctttgttcttcatgctatttctcattgcaaagcaccctaatgttgaagaggcaataataaaggaaatccagactgttattggtgagagagacataaagattgatgatatacaaaaattaaaagtgatggaaaacttcatttatgagagcatgcggtaccagcctgtcgtggacttggtcatgcgcaaagccttagaagatgatgtaatcgatggctacccagtgaaaaaggggacaaacattatcctgaatattggaaggatgcacagactcgagtttttccccaaacccaatgaatttactcttgaaaattttgcaaagaatgttccttataggtactttcagccatttggctttgggccccgtggctgtgcaggaaagtacatcgccatggtgatgatgaaagccatcctcgttacacttctgagacgattccacgtgaagacattgcaaggacagtgtgttgagagcatacagaagatacacgacttgtccttgcacccagatgagactaaaaacatgctggaaatgatctttaccccaagaagctcagacaggtgtctggaacactagagaaggctggtcagtacccactctggagcatttctcatcagtagttcacatacaaatcatccatccttgccaatagtgtcatcctcacagtgaacactcagtggcccatggcattttataggcatacctcctatgggttgtcccaagctaggtgctattggtcatctgctcctgttcacaccagagaaccaggctacaagagaaaaagcagaggccaagagtttgagggagaaatagtcggtgaagaaaccgtatccataaaagacccgattccaccaaatgtgctttgagaaggataggccttcattaacaaaatgtatgtctggttccccagtagagctctactgcctcaacccaaggggatttttatgtctggggcagaaacactcaagttgattagaaagaccaggccaatgtcagggtacctggggccaaacccacctgctagtgtgaattaaagtactttaattttgttttctgtggaggtggaaaagcaacattcatagtctttggagaaatgcttagaaattcagcatttgacccttgctgtgaattaagcccaattaattcctgtttgtctacatatgatctgtctgtggcaaaagtttaatcagaggaaattctttcccagtctgtcgatttatgcctcagccacttgcctgtgctacaattcattgtgttacctgtagattcaggtaatacaaactatatataatcatcaagtaatacaaactaatttagtaatagcctgggttaagtattattagggccctgtgtctgctgtagaaaaaaaattcacatgatgcacttcaaattcaaataaaaatccttttggcatgttcccatttttgcttagctcaattagtgtggctaaccaagagataactgtaaatgtgacattgatttgctcttactacagcttcagtgattgggggaggaaaagtcccaacccaatgggctcaaacttctaaggggtactcctctcatccccttatccttctccctcgacattttctccctctttcttcccatgaccccaaagccaagggcaacagatcagtaaagaacgtggtcagagtagaacccctgaagtattttttaatcctacctcaaaatttaacagttacctgagagatttaacattatctagttcatgaatcatgtatgtggtcatggataaattgcacaccttggaattcgctttctaaaggaaatcaaatgaatggaggaactttccaaacaccactttacttgtgttatatagccaatataactatctctactgaatgtcattgaaaaactaaaaaattaaacttatttacaaataggt

SEQ ID NO: 28914 - DNA, 4039 bp, Homo Sapiens
  misc_feature (219)..(219): n is a, c, g, or t
  misc_feature (3032)..(3032): n is a, c, g, or t
  misc_feature (3043)..(3043): n is a, c, g, or t
ctgcaggtagggccctcccaccccttcgccgcgccttacgaggcaagtctcccgcccttctctcagccaacatagaaaagcagcggagttcattctgctgtccggttgctgcacgggctccagcgcttcgcaactttggtttttttccacagatccagtggggtccggacatgggccccgcaggcgaaacgaacgttccagccaccaggaggccacctnattgtttcaaaaataaagactggttcctctcttggtttcagactgctatttttttcatggttggggatcagcgggagacggggaggtgctaggaggagagggcgggaaaagagggctctctcctcttccaatcctctgatcttcctgtgttgggagggtcagattactgtgccccagcccacgtccccccacgacccccgcacccccacctccccccacgaccccccccacctccgagcgggttctgtgcccaggtggcgctggagaaaggaacagcggaccccgcccaagtcattactaatgtagcaatcgtcttgcataaacccaggccacggttcctattggctgaagtcctctgaggtgacgtcatcgggacgtactaagactagggttgggccgagagtcggagccattactgcaggaaaaggtcccggagagctgagcagtcaagatggtggggcccaggtcttgggagacgggcaggattggggacgagaggcaggaagagacgggtcggggggcgaggagaaggcaggggtaggaggcaaagggaatctgaggacccgaaagttggaggtggggttggaaagactggggccctgcggggcaagcgagtctgcagcctgaaacaggagctttgtgggtcagagtttgtgggtcagagtttgtggggctgggatagaaactgggggattggcgttcagatgctgaccacttccctcttctctgagcagtgtgacttcaccgaagaccagaccgcaggtaggttatctctgatccctaccgaggtccacccttagggagagggacaccctccccccagcacctatcctctaatcttaatctgtcatctctttagcacccccatgagattaccccctggattattttctcttcttctggatcctccattttcttttctcactttcttcctccctccccttccactctagatctgatcccaagcactgggtgagttttaggtggtgtgggtatgaaaaaacttggtcacttaatgcctgctgtgtgtggggtctgggagggtgtataaagctgcctgctttcctttgtcctttaatcagctacttctgcctcttttctcctcttgtgataactgtccccgccctcccagcttcgagcacgttgtgaagattgtagagcagtgacctgatattgtgtcagatggggcacagacaggggagtttgctaaggataatgactgtagctatacctctggaagttctcttatatactggaggggtgcgaagtggctggttgggatgtccctagtcccaggctgctgctcccacttccttataaggacaggactgagactgggcggtggcgaattccagccctgagaagtgtagtagcagcagtggagattggcaggcctccgcgcaggaagtgcgagttgtgtaaatggatgttaccaggctgccagaaggggaggaagcctctatatagaacactttgagttgggaggaagagaaatagagccctcttaagtagactttggtgtacagtttggtgcagatatctcgtttcctcagcatgatcaaagttgaatgggcacgagagctctgaggtagggtttggattaaccctcaaatcctgtgttgacattcatctgaatcctagagttcaaggaggccttccagctgtttgaccgaacaggtgatggcaagatcctgtacagccagtgtggggatgtgatgagggccctgggccagaaccctaccaacgcggaggtgctcaaggtcctggggaaccccaagagtgatggtgaggggcctaaagaacaactcctcattgtcatgggcccacattcttcagctaagagcttccctttatcttcataggccccaaactcaagcaagtctggattacgaaatcccatggatttccttgcttttagtggggagtcatctgtcatctctctgttcagttgaggtctctataatcccctgtcctgagaacttgtgttacttctctggcctgacacttcacctcctttatggcagagatgaatgtgaaggtgctggactttgagcactttctgcccatgctgcagacagtggccaagaacaaggaccagggcacctatgaggattatgtcgaaggacttcgggtgtttgacaaggaaggaaatggcaccgtcatgggtgctgaaatccggcatgttcttgtcacactgggtaaggttctgtgtccttgtccttgagctgagatggcaccctaggtacctcacttgtcacccaattccaaaaatgctttctttccccctgcaggtgagaagatgacagaggaagaagtagagatgctggtggcagggcatgaggacagcaatggttgtatcaactatgaaggtaagaggtgaactgcgctttctcagagaaagcagccatatggggcaggtcaagtatagtgtctggggctttccctatccctggacttgggctccaaaaagagccaggaggcaaggtgcagggccctgccagcccagcccaggagtgggaggtcagggcggtataacaggaaaggaagggggtagtagtgtagagggtgggaaggaatgagaagtgaaataatggaatgtctgtcccactgcctgacccctcaccccatgtctttgtacttgtcttcaaccattaatgtctcttccttcctgcagcgtttgtgaggcatatcctgtcggggtgacgggcccatggggcggtacggctcctcccagcctctcctctagttgatctccccagtgtttcttttttccccaacctgtgctctttatcccctgcccttaccctactacnatctgacttcntcctggcatgtttctgcatggagctgactagggaggggagggattctcaaagaggaagaccaacctgggggtacagtacctccttactctagaatgggccctgaggttttacttatgcggccctgggtgctggtgtctgggaacctcaccagcctgtataccagtcttgctttagggtgaccttctggccctggagcatgggtagctggcatagaggggtatgggttgcctgccccattctgctgctatagctgaacagtcctttccccttccctcgctgggcagcttggcaggtaccctaacccaaaactctgtcctctcctcccgccagtggctgacagtagctgtaggtgtagtggagaacttttctgcctctgctgtgttcttgctgcttaggtttgggtgggggactaacagctgctgggaggggagctaggggcatggagaactggtcagactcaaggtggctcctctgcaaactgaccccagggttggttgctgtgggcatgttcccgcttatgctacctttgcagtctggtagtcccctggcccttggcgtacccctccacagccctgttccctggctcatcccacctttcctttccacagagctcgtccgcatggtgctgaatggctgaggaccttcccagtctccccagagtccgtgcctttccctgtgtgaattttgtatctagcctaaagtttccctaggctttcttgtctcagcaactttcccatcttgtctctcttggatgatgtttgccgtcagcattcaccaaataaacttgctctctgggccctcggttcggttctttctttcctgaacagggtaaaggggaagaaggtgagatggtgatgatttctgccctgaggcagagtccaaggtcaatcaatggtgcaggggttgaggaaagctgggggaggccctgtactagccatctgggcttcatttaaaaactactggccccattcatccatcttacacagctacctctt

SEQ ID NO: 28915 - DNA, 4956 bp, Homo Sapiens
  misc_feature (956)..(956): n is a, c, g, or t
tacctaatgccgtttccatccttttaaaccacaggcacatccatctggaaggcctttttcttcacccccaacttcaaccccgtgggttccaacggatgctttgccacacacgtgtgcttctgtttcgggagttatgtcacccatcacgacccacctttactctttgatatttccaaagatcccagagagagaaacccactaactccagcatccgagccccgcttttatgaaatcctcaaagtcatgcaggaagctgcggacagacacacccagaccctgccagaggtgcccgatcagttttcatggaacaactttctttggaagccctggcttcagctgtgctgtccttccaccggcctgtcttgccagtgtgatagagaaaaacaggataagagactgagccgctagcagcgcctggggaccagacagacgcatgtggcaaagctcaccatcttcactacaaacacgcctgagagtggcactggggaaacataactccatctacaccttggatttggactgattctccattttatcacctgaaggcttgggccagagctcaacagctactcaactggaggggtgagggggataaggtctgtagtatactgacaggaagatggtaggtttatgccttctgtggccagagtcttggactcatggaaatagaatgaatagaggggcattcacaaggcacaccagtgcaagcagatgacaaaaaggtgcagaaggcaatcttaaaacagaaaggtgcaggaggtaccttaactcacccctcagcaaatacctatgtcaacagtataagttaccatttactctataatctgcagtgatgcaataaccagcataataaaaaggcaatcacataaaaaagagtttagtcgtctaaacataagtaactttaaggtgaatgaaagatcttctttaggaataatagatgatggtaagttccactntggttattggaaggcaagtcattattattggtattagttaaaacacatatcaaatgcttgctcttcatcatatatatagttatgcatacatacacacacacacatacagtatattctttcctcaaaagggttaagatgtctaaaatagggacctagaagcttaacactatttaagtaaatacagtagaagctcacaaatagatttctttgcacaatgattttttgcaaaattttacagtaataataatcccaaggcaaatctctcctgaactgctttccattccataatttgtagtataattcttggattccactgttttctttggggaatggaagttctgaattaaaagaccactgtggagatgctgtggttcatggaatctcttccagtgtaattcagaatcatggcctagaaagtctctgatatttggaggggaacaaaaatcactcacaagcaatccatgatctatacacataagcataatttcctttagttctagttagtcatcagagaacagtcatgtatgcaagttttgtgactgagaaatttctgtgcttccaatccacaatgagatgcatgattttgttttcatcccatttcccccaagcccctgtaaatcagggaaaatgcgcaactgatcgcctaggagagggcctcgtagtggcacagctggagatagtttcaaagtctaaaccaccagcccatcctgaggaaagcctcctatggaatgtaaagtgcaatcatttcttcagatataagactttccccaacaatgtgattggattcctttatgctcaaaatcgagagaagctgccatccacctgcttatgcatttatctcttttgtggacttgtctgaccaccttctatttgcccagagtttgctcaattccaagacagtgcccatgaatgggacacctgtaatgtaacccacacagcggtttgcagagaatgttagccatgacttgggctttgtaaagttggctataatttctctatccctacccacaaccctgggaagttggagcaagaggggcatactattgggctgggaggatttgacagcatttccccagttgccctttaagttcttctatttcaaacgttaattttgcttctctttctaaaaaaaaaaaaaaaaaagaaagagaagaaagaagtgattcctacccctacctccagagttgttgaaagctgaaaagcatacaagattcttccttttaacttggatttctcgttccagaaattgtgggataatctgtattcttgctttagaaaacaattcttagagagggtactagcttactgatgatgtgttaggattgctactgatgctgtcatgtggaaactatttaaaggcactattataaatttatcctataagatgacaatgtttactcaaagtctaacatattcaatgcaagtaagactttctgaaaacacttgatgatgtggaaatgctgcaggacctaaataacttgaagagcctttatagattatatgaatgcctatttgtgtctagaaccagttatttaacctgtaaaatgtcaatagcaaatgaaggatgaagtatatctctagatgcaaatacattgagtttaaaagtgcctcaaaataattgagatcacatttcaggacatttggaaatcaggtcgatttgtggtaactgtagtcatcttaaatttcaaaccatttaccatctgaaagttttgatttgaatgtaaaacaggaaattggaattcctttgtccaggagaaacctcacaaaccttctttaaggcatagttttgttgtttgtttgcttgtttgttgcaggctgtaaggcatggctgcttgtttacaaagcatctcattcatattacctgtggagttgcatatccaaaccttagtgagttttgaagctttaagcaaattcttttaaaaaattcttgtatttctagcattactagatattaaaagttaagcaaatagattaatgacgtatacataggcatcatttcacaaggtcagtaatgctgcaggaaaagcaaaattgcaatctacgtatctatggtactaaggaagtcctgttttcaaaaatggaagcccacttctcagatttttctgaagggcatacaatgaaaagtgaaggggaaacacacacacacaaaaaaaacaagtatttggcttgtcacaggaatctgattgcattaagtgaaggattatttagaatatgttaatgcaaagctaaaataaaattttccttggcaattaaaaatgctgtgcgctaataccctgctttctatcgtgactcaattcaacaatgtggggaatgtttactacatttccaacttgatgtcaagcaatggggaatacaagttccagttctgcaaagattcgtcaactttcttagctcaagagagaggctgagaaatgcagagaagaataagacataaaatagctccgacctccatgatccgagagtgggaaaaggcccgattattacccataaggcacactctctaaggccttttaaggggcctacaaaaatgttttattttataatcagaagaaaaggaaatgaacattggggattgaaaatcatattggtatttgcaccaacatagtcataaaatagtatgttaatatgtttttactttatatatttatatattaaaatatatttaatatgttttgcctttgtggcccatgaaagtcttactgggccctggggaaggtatcctaccctggtgaagcagctgctttgctctacaaatacctggggcagaaatttgatttgaaaagtattattctctcttctctttgtttcaactggattcctttggaaaaccaaactagtatcagaacaaaccccgaaacagtaagaaattggagtgagaagggcatggtattgggactaggatcggctctcattcgatcgagctattctcttaaaatgacaaaaagtgtccataaagaggctgctggagagtgcgtggccatagggagccgacatgcccgggaggaaaggtgttgattacatggatacttctaaaagctaaagccttgttgccttctctttaatgcctagagaatgggatgtgtgatgcaaatgctcaaaacctcttaaatcatagctgtctgacctctacggacctcacatccatctgaggcttcatggacaaagattctccacttggccaaactttagccaagctcctcaaccttctcccaggcccaatctgggcacttccttgtaaaatctagttttggcaagaagtctattaggtcagtttagcaagaacacctaacccccccatatctgttcaacctcagtatctgatcaggctcctcagcctccaccatcccccaggtgatgtctggtcaactggcctaccttcagctagaatcctgttaggtcggtttagatcaatgctccctgatatttcctcttggtaatcttccatccactgcccatgaccctgttccctgtctataaatccccagttttccatggtatattcagagctgagtccagtctctctcccctactacaagtccccattgctgtggtccccgtacctgtcatgatggtcctaaataaagtcttactgtgctttaataggtagcattgaaaaatttttttctttgacatcattcatgacaacatgaaacctattgggacagcatgactgtgcagggtctttagagctcagctttctgaggccctgagcattcttggttttccgacatcgtgaacctgttctgtgttgcaagatatcactcaagccagtgttgcttaataccatctctttgtgtaatagatctgaataaagtaattgtaatacaccaatattttactttgttgagtattattttaatgggagcctttccaatgaaggaaacatcagctttccttgttagaatccaagcagcttaaaaactacccatgtctttctggaaaggaaacattgccatgtaactatgtatcagttttctaagaacttcatgggccttccata

SEQ ID NO: 28916 - DNA, 2722 bp, Homo Sapiens
gagcgggctgagggtaggaagtagccgctccgagtggaggcgactgggggctgaagagcgcgccgccctctcgtcccactttccaggtgtgtgatcctgtaaaattaaatcttccaagatgatctggtatatattaattataggaattctgcttccccagtctttggctcatccaggcttttttacttcaattggtcagatgactgatttgatccatactgagaaagatctggtgacttctctgaaagattatattaaggcagaagaggacaagttagaacaaataaaaaaatgggcagagaagttagatcggctaactagtacagcgacaaaagatccagaaggatttgttgggcatccagtaaatgcattcaaattaatgaaacgtctgaatactgagtggagtgagttggagaatctggtccttaaggatatgtcagatggctttatctctaacctaaccattcagagaccagtactttctaatgatgaagatcaggttggggcagccaaagctctgttacgtctccaggatacctacaatttggatacagataccatctcaaagggtaatcttccaggagtgaaacacaaatcttttctaacggctgaggactgctttgagttgggcaaagtggcctatacagaagcagattattaccatacggaactgtggatggaacaagccctaaggcaactggatgaaggcgagatttctaccatagataaagtctctgttctagattatttgagctatgcggtatatcagcagggagacctggataaggcacttttgctcacaaagaagcttcttgaactagatcctgaacatcagagagctaatggtaacttaaaatattttgagtatataatggctaaagaaaaagatgtcaataagtctgcttcagatgaccaatctgatcagaaaactacaccaaagaaaaaaggggttgctgtggattacctgccagagagacagaagtacgaaatgctgtgccgtggggagggtatcaaaatgacccctcggagacagaaaaaactcttttgccgctaccatgatggaaaccgtaatcctaaatttattctggctccagctaaacaggaggatgaatgggacaagcctcgtattattcgcttccatgatattatttctgatgcagaaattgaaatcgtcaaagacctagcaaaaccaaggctgagccgagctacagtacatgaccctgagactggaaaattgaccacagcacagtacagagtatctaagagtgcctggctctctggctatgaaaatcctgtggtgtctcgaattaatatgagaatacaagatctaacaggactagatgtttccacagcagaggaattacaggtagcaaattatggagttggaggacagtatgaaccccattttgactttgcacggaaagatgagccagatgctttcaaagagctggggacaggaaatagaattgctacatggctgttttatatgagtgatgtgtctgcaggaggagccactgtttttcctgaagttggagctagtgtttggcccaaaaaaggaactgctgttttctggtataatctgtttgccagtggagaaggagattatagtacacggcatgcagcctgtccagtgctagttggcaacaaatgggtatccaataaatggctccatgaacgtggacaagaatttcgaagaccttgtacgttgtcagaattggaatgacaaacaggcttccctttttctcctattgttgtactcttatgtgtctgatatacacatttccatagtcttaactttcaggagtttacaattgactaacactccatgattgattcagtcatgaacctcatcccatgtttcatctgtggacaattgcttactttgtgggttcttttaaaagtaacacgaaatcatcatattgcataaaaccttaaagttctgttggtatcacagaagacaaggcagagtttaaagtgaggaattttatatttaaagaactttttggttggataaaaacataatttgagcatccagttttagtatttcactacatctcagttggtgggtgttaagctagaatgggctgtgtgataggaaacaaatgccttacagatgtgcctaggtgttctgtttacctagtgtcttactctgttttctggatctgaagactagtaataaactaggacactaactgggttccatgtgattgccctttcatatgatcttctaagttgatttttttcctcccaagtcttttttaaagaaagtatactgtattttaccaaccccctctcttttcttttagctcctctgtggtgaattaaacgtacttgagttaaaatatttcgattttttttttttttttaatggaaagtcctgcataacaacactgggccttcttaactaaaatgctcaccacttagcctgtttttttatcccttttttaaaatgacagatgattttgttcaggaattttgctgtttttcttagtgctaataccttgcctcttattcctgctacagcagggtggtaatattggcattctgattaaatactgtgccttaggagactggaagtttaaaaatgtacaagtcctttcagtgatgagggaattgattttttttaaaagtctttttcttagaaagccaaaatgtttgtttttttaagattctgaaatgtgttgtgacaacaatgacctatttatgatcttaaatctttttt

SEQ ID NO: 28917 - DNA, 2722 bp, Homo Sapiens
gagcgggctgagggtaggaagtagccgctccgagtggaggcgactgggggctgaagagcgcgccgccctctcgtcccactttccaggtgtgtgatcctgtaaaattaaatcttccaagatgatctggtatatattaattataggaattctgcttccccagtctttggctcatccaggcttttttacttcaattggtcagatgactgatttgatccatactgagaaagatctggtgacttctctgaaagattatattaaggcagaagaggacaagttagaacaaataaaaaaatgggcagagaagttagatcggctaactagtacagcgacaaaagatccagaaggatttgttgggcatccagtaaatgcattcaaattaatgaaacgtctgaatactgagtggagtgagttggagaatctggtccttaaggatatgtcagatggctttatctctaacctaaccattcagagaccagtactttctaatgatgaagatcaggttggggcagccaaagctctgttacgtctccaggatacctacaatttggatacagataccatctcaaagggtaatcttccaggagtgaaacacaaatcttttctaacggctgaggactgctttgagttgggcaaagtggcctatacagaagcagattattaccatacggaactgtggatggaacaagccctaaggcaactggatgaaggcgagatttctaccatagataaagtctctgttctagattatttgagctatgcggtatatcagcagggagacctggataaggcacttttgctcacaaagaagcttcttgaactagatcctgaacatcagagagctaatggtaacttaaaatattttgagtatataatggctaaagaaaaagatgtcaataagtctgcttcagatgaccaatctgatcagaaaactacaccaaagaaaaaaggggttgctgtggattacctgccagagagacagaagtacgaaatgctgtgccgtggggagggtatcaaaatgacccctcggagacagaaaaaactcttttgccgctaccatgatggaaaccgtaatcctaaatttattctggctccagctaaacaggaggatgaatgggacaagcctcgtattattcgcttccatgatattatttctgatgcagaaattgaaatcgtcaaagacctagcaaaaccaaggctgaggcgagccaccatttcaaacccaataacaggagacttggagacggtacattacagaatttctaaaagtgcctggctctctggctatgaaaatcctgtggtgtctcgaattaatatgagaatacaagatctaacaggactagatgtttccacagcagaggaattacaggtagcaaattatggagttggaggacagtatgaaccccattttgactttgcacggaaagatgagccagatgctttcaaagagctggggacaggaaatagaattgctacatggctgttttatatgagtgatgtgtctgcaggaggagccactgtttttcctgaagttggagctagtgtttggcccaaaaaaggaactgctgttttctggtataatctgtttgccagtggagaaggagattatagtacacggcatgcagcctgtccagtgctagttggcaacaaatgggtatccaataaatggctccatgaacgtggacaagaatttcgaagaccttgtacgttgtcagaattggaatgacaaacaggcttccctttttctcctattgttgtactcttatgtgtctgatatacacatttccatagtcttaactttcaggagtttacaattgactaacactccatgattgattcagtcatgaacctcatcccatgtttcatctgtggacaattgcttactttgtgggttcttttaaaagtaacacgaaatcatcatattgcataaaaccttaaagttctgttggtatcacagaagacaaggcagagtttaaagtgaggaattttatatttaaagaactttttggttggataaaaacataatttgagcatccagttttagtatttcactacatctcagttggtgggtgttaagctagaatgggctgtgtgataggaaacaaatgccttacagatgtgcctaggtgttctgtttacctagtgtcttactctgttttctggatctgaagactagtaataaactaggacactaactgggttccatgtgattgccctttcatatgatcttctaagttgatttttttcctcccaagtcttttttaaagaaagtatactgtattttaccaaccccctctcttttcttttagctcctctgtggtgaattaaacgtacttgagttaaaatatttcgattttttttttttttttaatggaaagtcctgcataacaacactgggccttcttaactaaaatgctcaccacttagcctgtttttttatcccttttttaaaatgacagatgattttgttcaggaattttgctgtttttcttagtgctaataccttgcctcttattcctgctacagcagggtggtaatattggcattctgattaaatactgtgccttaggagactggaagtttaaaaatgtacaagtcctttcagtgatgagggaattgattttttttaaaagtctttttcttagaaagccaaaatgtttgtttttttaagattctgaaatgtgttgtgacaacaatgacctatttatgatcttaaatctttttt

SEQ ID NO: 28918 - DNA, 2449 bp, Homo Sapiens
cgctgccaccatggacagtagcacctggagccccaagaccaccgcggtcacccggcctgttgagacccacgagctcattcgcaatgcagccgatatctccatcatcgttatctacttcgtggtagtgatggccgtcggactgtgggctatgttttccaccaatcgtgggactgttggaggcttcttcctggcaggccgaagtatggtgtggtggccgattggagcctccctctttgctagtaacattggaagtggccactttgtggggctggccgggactggggcagcttcaggcatcgccattggaggctttgaatggaatgccctggttttggtggttgtgctgggctggctgtttgtccccatctatattaaggctggggtggtgacaatgccagagtacctgaggaagcggtttggaggccagcggatccaggtctacctttcccttctgtccctgctgctctacattttcaccaagatctcggcagacatcttctcgggggccatattcatcaatctggccttaggcctgaatctgtatttagccatctttctcttattggcaatcactgccctttacacaattacagggggcctggcggcggtgatttacacggacaccttgcagacggtgatcatgctggtggggtctttaatcctgactgggtttgcttttcacgaagtgggaggctatgacgccttcatggaaaagtacatgaaagccattccaaccatagtgtctgatggcaacaccacctttcaggaaaaatgctacactccaagggccgactccttccacatcttccgagatcccctcacgggagacctcccatggcctgggttcatctttgggatgtccatccttaccttgtggtactggtgcacagatcaggtcattgtgcagcgctgcctctcagccaagaatatgtctcacgtgaagggtggctgcatcctgtgtgggtatctaaagctgatgcccatgttcatcatggtgatgccaggaatgatcagccgcattctgtacacagaaaaaattgcctgtgtcgtcccttcagaatgtgagaaatattgcggtaccaaggttggctgtaccaacatcgcctatccaaccttagtggtggagctcatgcccaatggactgcgaggcctgatgctatcagtcatgctggcctccctcatgagctccctgacctccatcttcaacagcgccagcaccctcttcaccatggacatctacgccaaggtccgcaagagagcatctgagaaagagctcatgattgccggaaggttgtttatcctggtgctgattggcatcagcatcgcctgggtgcccattgtgcagtcagcacaaagtgggcaactcttcgattacatccagtccatcaccagttacttgggaccacccattgcggctgtcttcctgcttgctattttctggaagagagtcaatgagccaggagccttttggggactgatcctaggacttctgattgggatttcacgtatgattactgagtttgcttatggaaccgggagctgcatggagcccagcaactgtcccacgattatctgtggggtgcactacttgtactttgccattatcctcttcgccatttctttcatcaccatcgtggtcatctccctcctcaccaaacccattccggatgtgcatctctaccgtctgtgttggagcctgcgcaacagcaaagaggagcgtattgacctggatgcggaagaggagaacatccaagaaggccctaaggagaccattgaaatagaaacacaagttcctgagaagaaaaaaggaatcttcaggagagcctatgacctattttgtgggctagagcagcacggtgcacccaagatgactgaggaagaggagaaagccatgaagatgaagatgacggacacctctgagaagcctttgtggaggacagtgttgaacgtcaatggcatcatcctggtgaccgtggctgtcttttgccatgcatattttgcctgagtcctaccttttgctgtagatttaccatggctggactcttactcaccttcctttagtctcgtcctgtggtgttgaagggaaatcagccagttgtaaattttgcccaggtggataaatgtgtacatgtgtaattataggctagctggaagaaaaccattagtttgctgttaatttatgcatttgaagccagtgtgatacagccatctgtacctactggagccgcagaagggagtccactcagtcacatccagaaaaaggcagactaagaatcagaagccatgtgattgatgtctgacgtgagtctgtctcaggtagattccgggtgtcagtgtggtttataatccttgaatattgttttagaaactttggtctccctggttcctgccacttttcctgtccgtcctcctccccattttttttttaaaagaaagctgttttcccctc

SEQ ID NO: 28919 - DNA, 1231 bp, Homo Sapiens
gaattccagaaaagaggtggagagggggggaataagaaagagagagaaggaaaggagagaaggcaggaagaaggcaagggacgagacaaccatgctgtgctgtatgagaagaaccaaacaggttgaaaaaaatgatgacgaccaaaagattgaacaagatggtatcaaaccagaagataaagctcataaggccgcaaccaaaattcaggctagcttccgtggacacataacaaggaaaaagctcaaaggagagaagaaggatgatgtccaagctgctgaggctgaagctaataagaaggatgaagcccctgttgccgatggggtggagaagaagggagaaggcaccactactgccgaagcagccccagccactggctccaagcctgatgagcccggcaaagcaggagaaactccttccgaggagaagaagggggagggtgatgctgccacagagcaggcagccccccaggctcctgcatcctcagaggagaaggccggctcagctgagacagaaagtgccactaaagcttccactgataactcgccgtcctccaaggctgaagatgccccagccaaggaggagcctaaacaagccgatgtgcctgctgctgtcactgctgctgctgccaccacccctgccgcagaggatgctgctgccaaggcaacagcccagcctccaacggagactggggagagcagccaagctgaagagaacatagaagctgtagatgaaaccaaacctaaggaaagtgcccggcaggacgagggtaaagaagaggaacctgaggctgaccaagaacatgcctgaactctaagaaatggctttccacatccccaccctcccctctcctgagcctgtctctccctaccctcttctcagctccactctgaagtcccttcctgtcctgctcacgtctgtgagtctgtcctttcccacccactagccctctttctctctgtgtggcaaacatttaaaaaaaaaaaaaaaaagcaggaaagatcccaagtcaaacagtgtggcttaaacattttttgtttcttggtgttgttatggcaagtttttggtaatgatgattcaatcattttgggaaattcttgcactgtatccaagttatttgatctggtgcgtgtggccctgtgggagtccactttcctctctctctctctctctgttccaagtgtgtgtgcaatgttccgttcatctgaggagtccaaaatattgagtgaattc

SEQ ID NO: 28920 - DNA, 1066 bp, Homo Sapiens
catttgattaaagcaccagagtgtaatggccctcagagcagggctggtcctggggttccacaccctgatgaccctcctgagcccgcaggaggcaggggccaccaaggctgaccacatgggctcctacggacccgccttctaccagtcttacggcgcctcgggccagttcacccatgaatttgatgaggaacagctgttctctgtggacctgaagaaaagcgaggccgtgtggcgtctgcctgagtttggtgactttgcccgctttgacccgcagggcgggctggccggcatcgccgcaatcaaagcccatctggacatcctggtggagcgctccaaccgcagcagagccatcaacgtgcctccacgggtgaccgtgctccccaagtctcgggtggagctgggccagcccaacatcctcatctgcatcgtggacaacatcttcccccctgtgatcaatatcacctggctgcgcaacggccaaactgtcactgagggagtggcccagaccagcttctattcccagcctgaccatttgttccgcaagttccactacctgcccttcgtgccctcagccgaggacgtctatgactgccaggtggagcactggggcctggatgcgccactcctcaggcattgggagctccaggtgcctattccaccaccagatgccatggagaccctggtctgtgccctgggcctggccatcggcctggtgggcttcctcgtgggcaccgtcctcatcatcatgggcacatatgtgtccagtgtccccaggtaatgatccttctgagagaaatgacttgtgggagacaccctgcagatcctcatgggtttgtgacagaccctgcgtgctcagtgccctttaagtgcatcccgctgtgctgactttgagtgggatcaacatctgtcctacgggtcccctcttttttggccccagtattcatggcagggtttgttggacacctactagcttcccttcccattcaacacacacacacattcttgctctacccaaagctctggctggcagcactaaatgctttggtggtgtttgcactgtgtcctt

SEQ ID NO: 28921 - DNA, 498 bp, Homo Sapiens
  misc_feature (1)..(13): n is a, c, g, or t
nnnnnnnnnnnnnctatagaagacctgggacagaggactgctgtctgccctctctggtcaccctgcctagctagaggatctgtgaccccagccatgaggaccctcgccatccttgctgccattctcctggtggccctgcaggcccaggctgagccactccaggcaagagctgatgaggttgctgcagccccggagcagattgcagcggacatcccagaagtggttgtttcccttgcatgggacgaaagcttggctccaaagcatccaggctcaaggaaaaacatggcctgctattgcagaataccagcgtgcattgcaggagaacgtcgctatggaacctgcatctaccagggaagactctgggcattctgctgctgagcttgcagaaaaagaaaaatgagctcaaaatttgctttgagagctacagggaattgctattactcctgtaccttctgctcaatttcctttcctcatcccaaataaatgccttggtacaag

SEQ ID NO: 28922 - DNA, 2384 bp, Homo Sapiens
tattgagttcttcaaacattgtagcctctttatggtctctgagaaataactaccttaaacccataatctttaatacttcctaaactttcttaataagagaagctctattcctgacactacctctcatttgcaaggtcaaatcatcattagttttgtagtctattaactgggtttgcttaggtcaggcattattattactaaccttattgttaatattctaaccataagaattaaactattaatggtgaatagagtttttcactttaacataggcctatcccactggtgggatacgagccaattcgaaagaaaagtcagtcatgtgcttttcagaggatgaaagcttaagataaagactaaaagtgtttgatgctggaggtgggagtggtattatataggtctcagccaagacatgtgataatcactgtagtagtagctggaaagagaaatctgtgactccaattagccagttcctgcagaccttgtgaggactagaggaagaatgctcctggctgttttgtactgcctgctgtggagtttccagacctccgctggccatttccctagagcctgtgtctcctctaagaacctgatggagaaggaatgctgtccaccgtggagcggggacaggagtccctgtggccagctttcaggcagaggttcctgtcagaatatccttctgtccaatgcaccacttgggcctcaatttcccttcacaggggtggatgaccgggagtcgtggccttccgtcttttataataggacctgccagtgctctggcaacttcatgggattcaactgtggaaactgcaagtttggcttttggggaccaaactgcacagagagacgactcttggtgagaagaaacatcttcgatttgagtgccccagagaaggacaaattttttgcctacctcactttagcaaagcataccatcagctcagactatgtcatccccatagggacctatggccaaatgaaaaatggatcaacacccatgtttaacgacatcaatatttatgacctctttgtctggatgcattattatgtgtcaatggatgcactgcttgggggatctgaaatctggagagacattgattttgcccatgaagcaccagcttttctgccttggcatagactcttcttgttgcggtgggaacaagaaatccagaagctgacaggagatgaaaacttcactattccatattgggactggcgggatgcagaaaagtgtgacatttgcacagatgagtacatgggaggtcagcaccccacaaatcctaacttactcagcccagcatcattcttctcctcttggcagattgtctgtagccgattggaggagtacaacagccatcagtctttatgcaatggaacgcccgagggacctttacggcgtaatcctggaaaccatgacaaatccagaaccccaaggctcccctcttcagctgatgtagaattttgcctgagtttgacccaatatgaatctggttccatggataaagctgccaatttcagctttagaaatacactggaaggatttgctagtccacttactgggatagcggatgcctctcaaagcagcatgcacaatgccttgcacatctatatgaatggaacaatgtcccaggtacagggatctgccaacgatcctatcttccttcttcaccatgcatttgttgacagtatttttgagcagtggctccgaaggcaccgtcctcttcaagaagtttatccagaagccaatgcacccattggacataaccgggaatcctacatggttccttttataccactgtacagaaatggtgatttctttatttcatccaaagatctgggctatgactatagctatctacaagattcagacccagactcttttcaagactacattaagtcctatttggaacaagcgagtcggatctggtcatggctccttggggcggcgatggtaggggccgtcctcactgccctgctggcagggcttgtgagcttgctgtgtcgtcacaagagaaagcagcttcctgaagaaaagcagccactcctcatggagaaagaggattaccacagcttgtatcagagccatttataaaaggcttaggcaatagagtagggccaaaaagcctgacctcactctaactcaaagtaatgtccaggttcccagagaatatctgctggtatttttctgtaaagaccatttgcaaaattgtaacctaatacaaagtgtagccttcttccaactcaggtagaacacacctgtctttgtcttgctgttttcactcagcccttttaacattttcccctaagcccatatgtctaaggaaaggatgctatttggtaatgaggaactgttatttgtatgtgaattaaagtgctcttatttt

SEQ ID NO: 28923 - DNA, 1618 bp, Homo Sapiens
ctgcagagaaaacatacctcgggggacaaagtaagactgaaactaagaagattccagcactgcatactccaagtgaggaccacaaggtgggtcaggcaggcagttttagtcggaggaactcagagaggcatcgggtctgtgactgctggtcctgtgtctttccatgacccaatgctgctgctcaattcacacttgagaaagcctgtacttctcccacataaagcaggcagcctcacaatctctgagccctcagattgccatgcatctgtcttgtaacacacacacctgccatgggcttttaaggacttgggtgggctgagaggtgggaaatgccaactctgattgaaaagtgcctttggaggaatcaaaggtgccacacagggcaatcttctctctgttttctgcaaagtggaaactcccaagccctccatctccagtagcaacttaaaccccagggaggccatggaggctgtgatcttaacctgtgatcctgcggcttcagacacaagctacctgtggtggatgaatggtcagagcctccctatgactcacaggttgcagctgtccaaaaccaacaggaccctctttatatttggtgtcacaaagtatattgcaggaccctatgaatgtgaaatacggaacccagtgagtgccagccacagtgacccagtcaccctgaatctcctccgtgagtatcctctgttcctctgtgagccaggctgccatcccaaatacacaatggccagaggccaggcctctcagtccctctcaggtccaagtacagagacctttacccctggacatcaaagctggccatgactttctgccccaggcaaaacagagtaggcctaggcttgatccacaataggagaaaagaggctgctcctgtcatgggagactcaggttccacagcttgtgatgggagaaacaggtgaatgtctcaggctccagatcagtgaacacagcggggatttggctgggacttcagtgttgcgacttggctcacagggtcactgtggcccttccacagaccaggattttcccttccctctgacaatgtcacctgtgactttattctctttgctccagatggcctggatgcccccaccatttcttcctcatacacctattaccatacaggggaagtccccaatctctcctgcctcacagactctcacccactggcagagcattcttggctgattgatgggaagttccagcaatcagcacaagtgtgctttattccccaaatcaccaaaacatagagggatctatgtctgtttcatccataactcagccactgatggaacaaatctcataatcaagaggatcatagtccctggtaagtggatccctggagcattggcaatatgttttccagtgaagtctatctagctatcagggaagagccacctgccctctgcaaagggagagggaaaatcaaaaacccagcacagggagtatgtttctgctccaaaaccaccagcttttgcctttccccttcactctttctagatcattctttaggctatacactaacaatgaacaatctgaaaggaaattgagaaaagaatttcaattcacgttaacatcagaaggaataaaatattttggaata

SEQ ID NO: 28924 - DNA, 3306 bp, Homo Sapiens
gggaagcatggggcttcccaggctggtctgcgccttcttgctcgccgcctgctgctgctgtcctcgcgtcgcgggtgtgcccggagaggctgagcagcctgcgcctgagctggtggaggtggaagtgggcagcacagcccttctgaagtgcggcctctcccagtcccaaggcaacctcagccatgtcgactggttttctgtccacaaggagaagcggacgctcatcttccgtgtgcgccagggccagggccagagcgaacctggggagtacgagcagcggctcagcctccaggacagaggggctactctggccctgactcaagtcaccccccaagacgagcgcatcttcttgtgccagggcaagcgccctcggtcccaggagtaccgcatccagctccgcgtctacaaagctccggaggagccaaacatccaggtcaaccccctgggcatccctgtgaacagtaaggagcctgaggaggtcgctacctgtgtagggaggaacgggtaccccattcctcaagtcatctggtacaagaatggccggcctctgaaggaggagaagaaccgggtccacattcagtcgtcccagactgtggagtcgagtggtttgtacaccttgcagagtattctgaaggcacagctggttaaagaagacaaagatgcccagttttactgtgagctcaactaccggctgcccagtgggaaccacatgaaggagtccagggaagtcaccgtccctgttttctacccgacagaaaaagtgtggctggaagtggagcccgtgggaatgctgaaggaaggggaccgcgtggaaatcaggtgtttggctgatggcaaccctccaccacacttcagcatcagcaagcagaaccccagcaccagggaggcagaggaagagacaaccaacgacaacggggtcctggtgctggagcctgcccggaaggaacacagtgggcgctatgaatgtcaggcctggaacttggacaccatgatatcgctgctgagtgaaccacaggaactactggtgaactatgtgtctgacgtccgagtgagtcccgcagcccctgagagacaggaaggcagcagcctcaccctgacctgtgaggcagagagtagccaggacctcgagttccagtggctgagagaagagacagaccaggtgctggaaagggggcctgtgcttcagttgcatgacctgaaacgggaggcaggaggcggctatcgctgcgtggcgtctgtgcccagcatacccggcctgaaccgcacacagctggtcaagctggccatttttggccccccttggatggcattcaaggagaggaaggtgtgggtgaaagagaatatggtgttgaatctgtcttgtgaagcgtcagggcacccccggcccaccatctcctggaacgtcaacggcacggcaagtgaacaagaccaagatccacagcgagtcctgagcaccctgaatgtcctcgtgaccccggagctgttggagacaggtgttgaatgcacggcctccaacgacctgggcaaaaacaccagcatcctcttcctggagctggtcaatttaaccaccctcacaccagactccaacacaaccactggcctcagcacttccactgccagtcctcataccagagccaacagcacctccacagagagaaagctgccggagccggagagccggggcgtggtcatcgtggctgtgattgtgtgcatcctggtcctggcggtgctgggcgctgtcctctatttcctctataagaagggcaagctgccgtgcaggcgctcagggaagcaggagatcacgctgcccccgtctcgtaagaccgaacttgtagttgaagttaagtcagataagctcccagaagagatgggcctcctgcagggcagcagcggtgacaagagggctccgggagaccagggagagaaatacatcgatctgaggcattagccccgaatcacttcagctcccttccctgcctggaccattcccagctccctgctcactcttctctcagccaaagctcaaagggactagagagaagcctcctgctcccctcgcctgcacaccccctttcagagggccactgggttaggacctgaggacctcacttggccctgcaaggcccgcttttcagggaccagtccaccaccatctcctccacgttgagtgaagctcatcccaagcaaggagccccagtctcccgagcgggtaggagagtttcttgcagaacgtgttttttctttacacacattatgctgtaaatacgctcgtcctgccagcagctgagctgggtagcctctctgagctggtttcctgccccaaaggctggcattccaccatccaggtgcaccactgaagtgaggacacaccggagccaggcgcctgctcatgttgaagtgcgctgttcacacccgctccggagagcaccccagcagcatccagaagcagctgcagtgcaagcttgcatgcctgcgtgttgctgcaccaccctcctgtctgcctcttcaaagtctcctgtgacattttttctttggtcagaggccaggaactgtgtcattccttaaagatacgtgccggggccaggtgtggctcacgcctgtaatcccagcactttgggaggccgaggcggcggatcacaaagtcagacgagaccatcctggctaacacggtgaaaccctgtctctactaaaaatacaaaaaaaaattagctaggcgtagtggttggcacctatagtcccagctactcggaaggctgaagcaggagaatggtatgaatccaggaggtggagcttgcagtgagccgagaccgtgccactgcactccagcctgggcaacacagcgagactccgtctcgaggaaaaaaaaaatcgtgctcgtagcagctggctctgtttcgagtcaggtgaattagcctcaatccccgtgttcacttgctcccatagccctcttgatggatcacgtaaaactgaaaggcagcggggagcagacaaagatgaggtctacactgtccttcatggggattaaagctatggttatattagcaccaaacttctacaaaccaagctcaggacccaaccctagaagggcccaaatgagagaatggtacttagggatggcaaaacgggcctggctagagcttcgggtgtgtgtgtctgtctgtgtatgcatacatatgtgtgtatatatggttttgtcaggtgtgtaaatttgcaaattgtttcctttatatatgtatgtatatatatatatgaaaatatatatatatatgaaaaataaagcttaattgtcccagaaaaaaaaaaaaa

SEQ ID NO: 28925 - DNA, 2576 bp, Homo Sapiens
gggctcagagccgactggctcttttaggcactgactccgaacaggattctttcacccaggcatctcctccagagggatccgccagcccgtccagcagcaccatgtgggtgaccaaactcctgccagccctgctgctgcagcatgtcctcctgcatctcctcctgctccccatcgccatcccctatgcagagggacaaaggaaaagaagaaatacaattcatgaattcaaaaaatcagcaaagactaccctaatcaaaatagatccagcactgaagataaaaaccaaaaaagtgaatactgcagaccaatgtgctaatagatgtactaggaataaaggacttccattcacttgcaaggcttttgtttttgataaagcaagaaaacaatgcctctggttccccttcaatagcatgtcaagtggagtgaaaaaagaatttggccatgaatttgacctctatgaaaacaaagactacattagaaactgcatcattggtaaaggacgcagctacaagggaacagtatctatcactaagagtggcatcaaatgtcagccctggagttccatgataccacacgaacacagctttttgccttcgagctatcggggtaaagacctacaggaaaactactgtcgaaatcctcgaggggaagaagggggaccctggtgtttcacaagcaatccagaggtacgctacgaagtctgtgacattcctcagtgttcagaagttgaatgcatgacctgcaatggggagagttatcgaggtctcatggatcatacagaatcaggcaagatttgtcagcgctgggatcatcagacaccacaccggcacaaattcttgcctgaaagatatcccgacaagggctttgatgataattattgccgcaatcccgatggccagccgaggccatggtgctatactcttgaccctcacacccgctgggagtactgtgcaattaaaacatgcgctgacaatactatgaatgacactgatgttcctttggaaacaactgaatgcatccaaggtcaaggagaaggctacaggggcactgtcaataccatttggaatggaattccatgtcagcgttgggattctcagtatcctcacgagcatgacatgactcctgaaaatttcaagtgcaaggacctacgagaaaattactgccgaaatccagatgggtctgaatcaccctggtgttttaccactgatccaaacatccgagttggctactgctcccaaattccaaactgtgatatgtcacatggacaagattgttatcgtgggaatggcaaaaattatatgggcaacttatcccaaacaagatctggactaacatgttcaatgtgggacaagaacatggaagacttacatcgtcatatcttctgggaaccagatgcaagtaagctgaatgagaattactgccgaaatccagatgatgatgctcatggaccctggtgctacacgggaaatccactcattccttgggattattgccctatttctcgttgtgaaggtgataccacacctacaatagtcaatttagaccatcccgtaatatcttgtgccaaaacgaaacaattgcgagttgtaaatgggattccaacacgaacaaacataggatggatggttagtttgagatacagaaataaacatatctgcggaggatcattgataaaggagagttgggttcttactgcacgacagtgtttcccttctcgagacttgaaagattatgaagcttggcttggaattcatgatgtccacggaagaggagatgagaaatgcaaacaggttctcaatgtttcccagctggtatatggccctgaaggatcagatctggttttaatgaagcttgccaggcctgctgtcctggatgattttgttagtacgattgatttacctaattatggatgcacaattcctgaaaagaccagttgcagtgtttatggctggggctacactggattgatcaactatgatggcctattacgagtggcacatctctatataatgggaaatgagaaatgcagccagcatcatcgagggaaggtgactctgaatgagtctgaaatatgtgctggggctgaaaagattggatcaggaccatgtgagggggattatggtggcccacttgtttgtgagcaacataaaatgagaatggttcttggtgtcattgttcctggtcgtggatgtgccattccaaatcgtcctggtatttttgtccgagtagcatattatgcaaaatggatacacaaaattattttaacatataaggtaccacagtcatagctgaagtaagtgtgtctgaagcacccaccaatacaactgtcttttacatgaagatttcagagaatgtggaatttaaaatgtcacttacaacaatcctaagacaactactggagagtcatgtttgttgaaattctcattaatgtttatgggtgttttctgttgttttgtttgtcagtgttattttgtcaatgttgaagtgaattaaggtacatgcaagtgtaataacatatctcctgaagatacttgaatggattaaaaaaacacacaggtatatttgctggatgataa

SEQ ID NO: 28926 - DNA, 2450 bp, Homo Sapiens
agagggtccgccatgttccccggcggcgccgccgcttggctctggtagccgccgcccccgcccccaaccccgcccggcccagagcctagccgagccccgggcccagcatggccgccccggagccggcccgggctgcaccgcccccacccccgcccccgccgccccctcccggggctgaccgcgtcgtcaaagctgtccctttccccccaacacatcgcttgacatctgaagaagtatttgatttggatgggatacccagggttgatgttctgaagaaccacttggtgaaagaaggtcgagtagatgaagaaattgcgcttagaattatcaatgagggtgctgccatccttcggagagagaaaaccatgatagaagtagaagctccaatcacagtgtgtggtgacatccatggccaattttttgatctgatgaaactttttgaagtaggaggatcacctgctaatacacgatacctttttcttggcgattatgtggacagaggttattttagtatagagcatgttctaggcactgaagacatatcgattaatcctcacaataatattaatgagtgtgtcttatatttatgggttctgaagattctatacccaagcacattatttcttctgagaggcaaccatgaatgcagacaccttactgaatattttacctttaagcaggaatgtaaaattaagtattcggaaagagtctatgaagcttgtatggaagcttttgatagtttgcctcttgctgcacttttaaaccaacagtttctttgtgttcatggtggactttcaccagaaatacacacactggatgatattaggagattagatagattcaaagagccacctgcatttggaccaatgtgtgacttgttatggtccgatccttctgaagattttggaaatgaaaaatcacaggaacattttagtcacaatacagttcgaggatgttcttatttttataactatccagcagtgtgtgaatttttgcaaaacaataatttgttatcgattattagagctcatgaagctcaagatgcaggctatagaatgtacagaaaaagtcaaactacagggttcccttcattaataacaattttttcggcacctaattacttagatgtctacaataataaagctgctgtattaaagtatgaaaataatgtgatgaatattcgacagtttaactgttctccacatccttactggttgcctaattttatggatgtcttcacgtggtctttaccgtttgttggagaaaaagtgacagaaatgttggtaaatgttctgagtatttgctctgatgatgaactaatgactgaaggtgaagaccagtttgatggttcagctgcagcccggaaagaaatcataagaaacaaaattcgagcaattggcaagatggcaagagtcttctctgttctcagggaggagagtgaaagtgtgctgacactcaagggcctgactcccacagggatgttgcctagtggagtgttagctggaggacggcagaccctgcaaagtggtaatgatgttatgcaacttgctgtgcctcagatggactggggcacacctcactcttttgctaacaattcacataatgcatgcagggaattccttctgttttttagttcctgtctcagcagctgacctagacagggtagtgtattagctagtgtctcattaatacgtgatcagggcagaaaactgatagaatgggtattcctttcaattgaaaataatggtcagttcctcagcttttcatgaaatgatatgggagcagctcatatcataatgtctgaaatatttatttattcatctgtctaattcacccttttcttttaaaagccccagtttcagaatgtgaatcagggatattcctgttactaaaatggaaatgtaattccaagtttcttttttaattttttaaatttatgtcattgtattggactatgcttatatttaaaactacttaatttagagttaactacctgcttaggccccagaacattacttatgcccttcagttaccaaaagatttgtgcaaggttttgtaccctggtaaatgatgccaaagtttgttttctgtggtgtttgtcaaatgttctatgtataattaactgtctgtaacatgctgtttccttcctctgcagatgtagctgctttcctaaatctgtctgtctttctttaggttagctgtatgtctgtaaaagtatgttcaattaaattactccatcagacacttgtctgtcttgcaatgtagaagcagctttgtagcaccttgttttgaggtttgctgcatttgttgctgcactttgtgcattctgaacatgaatgtaacattagatattaagtcattgttataaggggttgaatttaaatcctgtaagtcaaaattgaaagggtgttattaagtgtgcctttattttgcatgaaaataaaaagaat

SEQ ID NO: 28927 - DNA, 2277 bp, Homo Sapiens
acatggcgaacgaggttatcaagtgcaaggctgcagttgcttgggaggctggaaagcctctctccatagaggagatagaggtggcacccccaaaggctcatgaagttcgaatcaagatcattgccactgcggtttgccacaccgatgcctataccctgagtggagctgatcctgagggttgttttccagtgatcttgggacatgaaggtgctggaattgtggaaagtgttggtgagggagttactaagctgaaggcgggtgacactgtcatcccactttacatcccacagtgtggagaatgcaaattttgtctaaatcctaaaactaacctttgccagaagataagagtcactcaagggaaaggattaatgccagatggtaccagcagatttacttgcaaaggaaagacaattttgcattacatgggaaccagcacattttctgaatacacagttgtggctgatatctctgttgctaaaatagatcctttagcacctttggataaagtctgccttctaggttgtggcatttcaaccggttatggtgctgctgtgaacactgccaagttggagcctggctctgtttgtgccgtctttggtctgggaggagtcggattggcagttatcatgggctgtaaagtggctggtgcttcccggatcattggtgtggacatcaataaagataaatttgcaagggccaaagagtttggagccactgaatgtattaaccctcaggattttagtaaacccatccaggaagtgctcattgagatgaccgatggaggagtggactattcctttgaatgtattggtaatgtgaaggtcatgagagcagcacttgaggcatgtcacaagggctggggcgtcagcgtcgtggttggagtagctgcttcaggtgaagaaattgccactcgtccattccagctggtaacaggtcgcacatggaaaggcactgcctttggaggatggaagagtgtagaaagtgtcccaaagttggtgtctgaatatatgtccaaaaagataaaagttgatgaatttgtgactcacaatctgtcttttgatgaaatcaacaaagcctttgaactgatgcattctggaaagagcattcgaactgttgtaaagatttaattcaaaagagaaaaataatgtccatcctgtcgtgatgtgataggagcagcttaacaggcagggagaagcgcctccaacctcacagcctcgtagagcttcacagctactccagaaaatagggttatgtgtgtcattcatgaatctctataatcaaggacaaggataattcagtcatgaacctgttttctggatgctcctccacataaataattgctagtttattaaggaatattttaacataataaaagtaatttctacatttgtgtggaaattgtcttgttttatgctgtcatcattgtcacggttgtctgccattatcttcattctgcaagggaaagggaaaggaagcagggcagtggtgggtgtctgaaacctcagaaacataacgttgaacttttaagggtctcagtccccgttgattaaagaacagatcctagccatcagtgacaaagttaatcaggacccaagtctgcttctgtgatattatcttgaagggaggtactgtgccttgttcatacctgtaccccaaattcctaggatgcatctgccttcagggggcactaaaatgtattattgaaacagcattctgggcttaaataggtgtatgtatgtgttggttgtgactgtactattctagtatagtgaactacatactgaatatccaagttctcagcacctacttttgtcaaatcttaacattttgccacttcgagatcacattgccttcctcccctccaagaggtaacaattatccacaatttgatgtttatcattcctgtgttgttgtactttcactgtgtataacctaaaccatctactctttagtactgttttatatatttttaagcctcatacttgctcattctacagcttttttcactcattattgtataattatatctgaagctctcgttcattaattttagtcctgtgtagcagaattcaattacgggaaactaccataatttatctgttctccagtccagttgaaggcatgaagttgttgccagtttctgtattataacactgtagtggaacattcttctgcattgggctactcgcgtgttacctaagacgtatcacagaataaacacatttagccttatagacattgccaaattgctcttcaaagtaaatgtgagtttttgtg

SEQ ID NO: 28928 - DNA, 2961 bp, Homo Sapiens
aagagatgatttctccatcctgaacgtgcagcgagcttgtcaggaagatcggaggtgccaagtagcagagaaagcatcccccagctctgacagggagacagcacatgtctaaggcccacaagccttggccctaccggaggagaagtcaattttcttctcgaaaatacctgaaaaaagaaatgaattccttccagcaacagccaccgccattcggcacagtgccaccacaaatgatgtttcctccaaactggcagggggcagagaaggacgctgctttcctcgccaaggacttcaactttctcactttgaacaatcagccaccaccaggaaacaggagccaaccaagggcaatggggcccgagaacaacctgtacagccagtacgagcagaaggtgcgcccctgcattgacctcatcgactccctgcgggctctgggtgtggagcaggacctggccctgccagccatcgccgtcatcggggaccagagctcgggcaagagctctgtgctggaggcactgtcaggagtcgcgcttcccagaggcagcggaatcgtaaccaggtgtccgctggtgctgaaactgaaaaagcagccctgtgaggcatgggccggaaggatcagctaccggaacaccgagctagagcttcaggaccctggccaggtggagaaagagatacacaaagcccagaacgtcatggccgggaatggccggggcatcagccatgagctcatcagcctggagatcacctcccctgaggttccagacctgaccatcattgaccttcccggcatcaccagggtggctgtggacaaccagccccgagacatcggactgcagatcaaggctctcatcaagaagtacatccagaggcagcagacgatcaacttggtggtggttccctgtaacgtggacattgccaccacggaggcgctgagcatggcccatgaggtggacccggaaggggacaggaccatcggtatcctgaccaaaccagatctaatggacaggggcactgagaaaagcgtcatgaatgtggtgcggaacctcacgtaccccctcaagaagggctacatgattgtgaagtgccggggccagcaggagatcacaaacaggctgagcttggcagaggcaaccaagaaagaaattacattctttcaaacacatccatatttcagagttctcctggaggaggggtcagccacggttccccgactggcagaaagacttaccactgaactcatcatgcatatccaaaaatcgctcccgttgttagaaggacaaataagggagagccaccagaaggcgaccgaggagctgcggcgttgcggggctgacatccccagccaggaggccgacaagatgttctttctaattgagaaaatcaagatgtttaatcaggacatcgaaaagttagtagaaggagaagaagttgtaagggagaatgagacccgtttatacaacaaaatcagagaggattttaaaaactgggtaggcatacttgcaactaatacccaaaaagttaaaaatattatccacgaagaagttgaaaaatatgaaaagcagtatcgaggcaaggagcttctgggatttgtcaactacaagacatttgagatcatcgtgcatcagtacatccagcagctggtggagcccgcccttagcatgctccagaaagccatggaaattatccagcaagctttcattaacgtggccaaaaaacattttggcgaatttttcaaccttaaccaaactgttcagagcacgattgaagacataaaagtgaaacacacagcaaaggcagaaaacatgatccaacttcagttcagaatggagcagatggttttttgtcaagatcagatttacagtgttgttctgaagaaagtccgagaagagatttttaaccctctggggacgccttcacagaatatgaagttgaactctcattttcccagtaatgagtcttcggtttcctcctttactgaaataggcatccacctgaatgcctacttcttggaaaccagcaaacgtctcgccaaccagatcccatttataattcagtattttatgctccgagagaatggtgactccttgcagaaagccatgatgcagatactacaggaaaaaaatcgctattcctggctgcttcaagagcagagtgagaccgctaccaagagaagaatccttaaggagagaatttaccggctcactcaggcgcgacacgcactctgtcaattctccagcaaagagatccactgaagggcggcgatgcctgtggttgttttcttgtgcgtactcattcattctaaggggagtcggtgcaggatgccgcttctgctttggggccaaactcttctgtcactatcagtgtccatctctactgtactccctcagcatcagagcatgcatcaggggtccacacaggctcagctctctccaccacccagctcttccctgaccttcacgaagggatggctctccagtccttgggtcccgtagcacacagttacagtgtcctaagatactgctatcattcttcgctaatttgtatttgtattcccttccccctacaagattatgagaccccagagggggaaggtctgggtcaaattcttcttttgtatgtccagtctcctgcacagcacctgcagcattgtaactgcttaataaatgacatctcactgaacgaatgagtgctgtgtaagtgatggagatacctgaggctattgctcaagcccaggccttggacatttagtgactgttagccggtccctttcagatccagtggccatgccccctgcttcccatggttcactgtcattgtgtttcccagcctctccactcccccgccagaaaggagcctgagtgattctcttttcttcttgtttccctgattatgatgagcttccattgttctgttaagtcttgaagaggaatttaataaagcaaagaaactttttaaaaacgt

SEQ ID NO: 28929 - DNA, 3259 bp, Homo Sapiens
gacgcgcgccgggagccggcggccgggccagccggcgccggggcccagtgcgccgcgctcgcagccggtagcgcgccagccgtaggcgtcgctcggcagccgcggggccctaggcgtgccggggagggggcgagggcggccaggcgcctgccgccccggaggcaggatgagcatcgagatcccggcgggactgacggagctgctgcagggcttcacggtggaggtgctgaggcaccagcccgcggacctgctggagttcgcgctgcagcacttcacccgcctgcagcaggagaacgagcgcaaaggcaccgcgcgcttcggccatgagggcaggacctggggggacctgggcgccgctgccgggggcggcacccccagcaagggggtcaacttcgccgaggagcccatgcagtccgactccgaggacggggaggaggaggaggcggcgcccgcggacgcaggggcgttcaatgctccagtaataaaccgattcacaaggcgtgcctcagtatgtgcagaagcttataatcctgatgaagaagaagatgatgcagagtccaggattatacatccaaaaactgatgatcaaagaaataggttgcaagaggcttgcaaagacatcctgctgtttaagaatctggatccggagcagatgtctcaagtattagatgccatgtttgaaaaattggtcaaagatggggagcatgtaattgatcaaggtgacgatggtgacaacttttatgtaattgatagaggcacatttgatatttatgtgaaatgtgatggtgttggaagatgtgttggtaactatgataatcgtgggagtttcggcgaactggccttaatgtacaatacacccagagcagctacaatcactgctacctctcctggtgctctgtggggtttggacagggtaaccttcaggagaataattgtgaaaaacaatgccaaaaagagaaaaatgtatgaaagctttattgagtcactgccattccttaaatctttggagttttctgaacgcctgaaagtagtagatgtgataggcaccaaagtatacaacgatggagaacaaatcattgctcagggagattcggctgattcttttttcattgtagaatctggagaagtgaaaattactatgaaaagaaagggtaaatcagaagtggaagagaatggtgcagtagaaatgcctcgatgctcgcggggacagtactttggagagcttgccctggtaactaacaaacctcgagcagcttctgcccacgccattgggactgtcaaatgtttagcaatggatgtgcaagcatttgaaaggcttctgggaccttgcatggaaattatgaaaaggaacatcgctacctatgaagaacagttagttgccctgtttggaacgaacatggatattgttgaacccactgcatgaagcaaaagtatggagcaagacctgtagtgacaaaattacacagtagtggttagtccactgagaatgtgtttgtgtagatgccaagcattttctgtgatttcaggttttttcctttttttacatttacaacgtatcaataaacagtagtgatttaatagtcaataggctttaacatcactttctaaagagtagttcataaaaaaatcaacatactgataaaatgactttgtactccacaaaattatgactgaaaggtttattaaaatgattgtaatatatagaaagtatctgtgtttaagaagataattaaaggatgttatcataggctatatgtgttttacttattcagactgataatcatattagtgactatccccatgtaagagggcacttggcaattaaacatgctacacagcatggcatcacttttttttataactcattaaacacagtaaaattttaatcatttttgttttaaagttttctagcttgataagttatgtgctgccttggcctattggtgaaatggtataaaatatcatatgcagttttaaaactttttatatttttgcaataaagtacattttgactttgttggcataatgtcagtaacatacatattccagtggttttatggacaggcaatttagtcattatgataataaggaaaacagtgttttagatgagagatcattaatgcatttttccctcatcaagcatatatctgcttttttttattttgcaattctctgtattctatgtctttaaaaatttgatcttgacatttaatgtcacaaagttttgtttttttaaaaagtgatttaaacttaagatccgacattttttgtattctttaagattttacacctaaaaaatctctcctatcccaaaaataatgtgggatccttatcagcatgcccacagtttatttctttgttcttcactaggcctgcataatacagtcctatgtagacatctgttcccttgggtttccgttctttcttaggatggttgccaacccacaatctcattgatcagcagccaatatgggtttgtttggtttttttaattcttaaaaacatcctctagaggaatagaaacaaatttttatgagcataaccctatataaagacaaaatgaatttctgaccttaccatatataccattaggccttgccattgctttaatgtagactcatagttgaaattagtgcagaaagaactcagatgtactagattttcattgttcattgatatgctcagtatgctgccacataagatgaatttaattatattcaaccaaagcaatatactcttacatgatttctaggccccatgacccagtgtctagagacattaattctaaccagttgtttgcttttaaatgagtgatttcattttgggaaacaggtttcaaatgaatatatatacatgggtaaaattactctgtgctagtgtagtcttactagagaatgtttatggtcccacttgtatatgaaaatgtggttagaatgttaattggataatgtatatataagaagttaaagtatgtaaagtataacttcagccacatttttagaacactgtttaacatttttgcaaaaccttcttgtaggaaaagagagctctctacatgaagatgacttgttttatatttcagattttattttaaaagccatgtctgttaaacaagaaaaaacacaaaagaactccagattcctggttcatcattctgtattcttactcactttttcaagttatctattttgttgcataaactaattgttaactattcatggaacagcaaacgcctgtttaataaagaactttgaccaag

SEQ ID NO: 28930 - DNA, 2178 bp, Homo Sapiens
aaaactctgatctggggaggaaccaggactacatagatcaaggcagttttcttctttgagaaactatcccagatatcatcatagagtcttctgctcttcctcaactaccaaagaaaaacatcagcgaagcagcaggccatgcaccccccaaaaactccatctggggctcttcatagaaaaaggaaaatggcagcctggcccttctccaggctgtggaaagtctctgatccaattctcttccaaatgaccttgatcgctgctctgttgcctgctgttcttggcaattgtggtcctccacccactttatcatttgctgccccgatggatattacgttgactgagacacgcttcaaaactggaactactctgaaatacacctgcctccctggctacgtcagatcccattcaactcagacgcttacctgtaattctgatggcgaatgggtgtataacaccttctgtatctacaaacgatgcagacacccaggagagttacgtaatgggcaagtagagattaagacagatttatcttttggatcacaaatagaattcagctgttcagaaggatttttcttaattggctcaaccactagtcgttgtgaagtccaagatagaggagttggctggagtcatcctctcccacaatgtgaaattgtcaagtgtaagcctcctccagacatcaggaatggaaggcacagcggtgaagaaaatttctacgcatacggcttttctgtcacctacagctgtgacccccgcttctcactcttgggccatgcctccatttcttgcactgtggagaatgaaacaataggcgtttggagaccaagccctcctacctgtgaaaaaatcacctgtcgcaagccagatgtttcacatggggaaatggtctctggatttggacccatctataattacaaagacactattgtgtttaagtgccaaaaaggttttgttctcagaggcagcagtgtaattcattgtgatgctgatagcaaatggaatccttctcctcctgcttgtgagcccaatagttgtattaatttaccagacattccacatgcttcctgggaaacatatcctaggccgacaaaagaggatgtgtatgttgttgggactgtgttaaggtaccgctgtcatcctggctacaaacccactacagatgagcctacgactgtgatttgtcagaaaaatttgagatggaccccataccaaggatgtgaggcgttatgttgccctgaaccaaagctaaataatggtgaaatcactcaacacaggaaaagtcgtcctgccaatcactgtgtttatttctatggagatgagatttcattttcatgtcatgagaccagtaggttttcagctatatgccaaggagatggcacgtggagtccccgaacaccatcatgtggagacatttgcaattttcctcctaaaattgcccatgggcattataaacaatctagttcatacagctttttcaaagaagagattatatatgaatgtgataaaggctacattctggtcggacaggcgaaactctcctgcagttattcacactggtcagctccagcccctcaatgtaaagctctgtgtcggaaaccagaattagtgaatggaaggttgtctgtggataaggatcagtatgttgagcctgaaaatgtcaccatccaatgtgattctggctatggtgtggttggtccccaaagtatcacttgctctgggaacagaacctggtacccagaggtgcccaagtgtgagtgggagacccccgaaggctgtgaacaagtgctcacaggcaaaagactcatgcagtgtctcccaaacccagaggatgtgaaaatggccctggaggtatataagctgtctctggaaattgaacaactggaactacagagagacagcgcaagacaatccactttggataaagaactataatttttctcaaaagaaggaggaaaaggtgtcttgctggcttgcctcttgcaattcaatacagatcagtttagcaaatctactgtcaatttggcagtgatattcatcataataaatatctagaaatgataatttgctaaagtttagtgctttgagattgtgaaattattaatcatcctctgtgtggctcatgtttttgcttttcaacacacaaagcacaaattttttttcgattaaaaatgtatgtat

SEQ ID NO: 28931 - DNA, 4396 bp, Homo Sapiens
gcctgaggtgcccgccctggccccaggagaatgaaccagccgcagaggatggcgcctgtgggcacagacaaggagctcagtgacctcctggacttcagcatgatgttcccgctgcctgtcaccaacgggaagggccggcccgcctccctggccggggcgcagttcggaggttcaggtcttgaggaccggcccagctcaggctcctggggcagcggcgaccagagcagctcctcctttgaccccagccggaccttcagcgagggcacccacttcactgagtcgcacagcagcctctcttcatccacattcctgggaccgggactcggaggcaagagcggtgagcggggcgcctatgcctccttcgggagagacgcaggcgtgggcggcctgactcaggctggcttcctgtcaggcgagctggccctcaacagccccgggcccctgtccccttcgggcatgaaggggacctcccagtactacccctcctactccggcagctcccggcggagagcggcagacggcagcctagacacgcagcccaagaaggtccggaaggtcccgccgggtcttccatcctcggtgtacccacccagctcaggtgaggactacggcagggatgccaccgcctacccgtccgccaagacccccagcagcacctatcccgcccccttctacgtggcagatggcagcctgcacccctcagccgagctctggagtcccccgggccaggcgggcttcgggcccatgctgggtgggggctcatccccgctgcccctcccgcccggtagcggcccggtgggcagcagtggaagcagcagcacgtttggtggcctgcaccagcacgagcgtatgggctaccagctgcatggagcagaggtgaacggtgggctcccatctgcatcctccttctcctcagcccccggagccacgtacggcggcgtctccagccacacgccgcctgtcagcggggccgacagcctcctgggctcccgagggaccacagctggcagctccggggatgccctcggcaaagcactggcctcgatctactccccggatcactcaagcaataacttctcgtccagcccttctacccccgtgggctccccccagggcctggcaggaacgtcacagtggcctcgagcaggagcccccggtgccttatcgcccagctacgacgggggtctccacggcctgcagagtaagatagaagaccacctggacgaggccatccacgtgctccgcagccacgccgtgggcacagccggcgacatgcacacgctgctgcctggccacggggcgctggcctcaggtttcaccggccccatgtcgctgggtgggcggcacgcaggcctggttggaggcagccaccccgaggacggcctcgcaggcagcaccagcctcatgcacaaccacgcggccctccccagccagccaggcaccctccctgacctgtctcggcctcccgactcctacagtgggctagggcgagcaggtgccacggcggccgccagcgagatcaagcgggaggagaaggaggacgaggagaacacgtcagcggctgaccactcggaggaggagaagaaggagctgaaggccccccgggcccggaccagcccagacgaggacgaggacgaccttctccccccagagcagaaggccgagcgggagaaggagcgccgggtggccaataacgcccgggagcggctgcgggtccgtgacatcaacgaggcctttaaggagctggggcgcatgtgccaactgcacctcaacagcgagaagccccagaccaaactgctcatcctgcaccaggctgtctcggtcatcctgaacttggagcagcaagtgcgagagcggaacctgaatcccaaagcagcctgtttgaaacggcgagaagaggaaaaggtgtcaggtgtggttggagacccccagatggtgctttcagctccccacccaggcctgagcgaagcccacaaccccgccgggcacatgtgaaaggtatgcctccgtgggacgagccacccgctttcagccctgtgctctggccccagaagccggactcgagaccccgggcttcatccacatccacacctcacacacctgttgtcagcatcgagccaacaccaacctgacaaggttcggagtgatgggggcggccaaggtgacactgggtccaggagctccctggggccctggcctaccactcactggcctcgctccccctgtccccgaatctcagccaccgtgtcactctgtgacctgtcccatggatcctgaaactgcatcttggccctgttgcctgggctgacaggagcattttttttttttccagtaaacaaaacctgaaagcaagcaacaaaacatacactttgtcagagaagaaaaaaatgccttaactataaaaagcggagaaatggaaacatatcactcaagggggatgctgtggaaacctggcttattcttctaaagccaccagcaaattgtgcctaagcgaaatattttttttaaggaaaataaaaacattagttacaagattttttttttcttaaggtagatgaaaattagcaaggatgctgcctttggtctctggtttttttaagctttttttgcatatgttttgtaagcaacaaatttttttgtataaaagtcccgtgtctctcgctatttctgctgctgttcctagactgagcattgcatttcttgatcaaccagatgattaaacgttgtattaaaaagaccccgtgtaaacctgagccccccccgtccccccccccggaagccactgcacacagacagacggggacaggcggcgggtcttttgtttttttgatgttgggggttctcttggttttgtcatgtggaaagtgatgcgtgggcgttccctgatgaaggcaccttggggcttccctgccgcatcctctcccctcaggaaggggactgacctgggcttgggggaagggacgtcagcaaggtggctctgaccctcccaggtgactctgccaagcagctgtggccccagcggtaccctacacaacgccctccccaggcccccctaagctgctctcccttggaacctgcacagctctctgaaatggggcattttgttgggaccagtgacccctggcatggggaccacaccctggagcccggtgctggggacctcctggacaccctgtccttcactccttgccccagggacccaggctcatgctctgaactctggctgagaggagtctgctcaggagccagcacaggacaccccccaccccaccccaccatgtccccattacaccagagggccatcgtgacgtagacaggatgccaggggcctgaccagcctccccaatgctggggagcatccctggcctggggccacacctgctgccctccctctgtgtggtccaagggcaagagtggctggagccgggggactgtgctggtctgagccccacgaaggccttgggctgtggctccgaccctgctgcagaaccagcagggtgtcccctcgggcccatctgtgtcccatgtcccagcacccaggcctctctccaggtctccttttctggtcttttgccatgagggtaaccagctcttcccagctggctgggactgtcttgggtttaaaactgcaagtctcctaccctgggatcccatccagttccacacgaactagggcagtggtcactgtggcacccaggtgtgggcctggctagctgggggccttcatgtgcccttcatgcccctccctgcattgaggccttgtggacccctgggctggctgtgttcatccccgctgcaggtcgggcgtctccccccgtgccactcctgagactccaccgttacccccaggagatcctggactgcctgactcccctccccagactggcttgggagcctgggccccatggtagatgcaagggaaacctcaaggccagctcaatgcctggtatctgcccccagtccaggccaggcggaggggaggggctgtccggctgcctctcccttctcggtggcttcccctgcgccctgggagtttgatctcttaagggaacttgcctctccctcttgttttgctcctgccctgcccctaggtctgggtggcagtggccccatagcctctggaactgtgcgttctgcatagaattcaaacgagattcacccagcgcgaggaggaagaaacagcagttcctgggaaccacaattatggggggtggggggtgtgatctgagtgcctcaagatggttttcaaaaaattttttttaaagaaaataattgtatacgtgtcaacacagctggctggatgattgggactttaaaacgaccctctttcaggtggattcagagacctgtcctgtatataacagcactgtagcaataaacgtgacattttataaag

SEQ ID NO: 28932 - DNA, 6240 bp, Homo Sapiens
actgaaaaatcaaagcaagtgtttcttctgtctgtaccttcacttgactgtttacctatcacaagaagtaattccatgccgaccacaggttattcagcagtacctgcaaatataatacctcctcctcatccactaagaggaagtcagtcatttgatgacaaaattggcgctttctatgatgatgtctttgtatcgggacctaacgctcctgtgccccagagtgggcatccccgtacacttgtgagacaagcagccatagaagactcttcagcaaatgaaagtcatgttcttggtactggacagtccctggatgagagccaccaaggatgccatgctgctggtgaagccatgtcagtgaggagcaaggcactggcacaaggcccacatatagaaaaaaagaagtctcatcaagggcgagggacaatgtttgagtgtgaaacttgtagaaacaggtataggaaactggaaaattttgaaaatcataagaaattttactgttctgagttacatggaccaaaaacaaaggtagccatgagagaacctgagcacagccctgtgcccggcggtctgcagcctcagattctacactacagagtcgctgggtcctccggcatctgggaacagacgccccagataagaaaaaggaggaaaatgaaaagtgttggggatgatgaagaacttcagcaaaatgaaagtggaacatctccaaaaagttctgaaggccttcagtttcagaatgctctgggctgtaatcccagtttgcctaaacataatgttaccataagaagtgaccagcagcataaaaatatacagttgcaaaactcccatattcaccttgttgccaggggccctgagcagaccatggatcccaagctgtcgaccatcatggaacaacagataagttcagcagcccaggacaagatagaactgcagagacacggaactggaatctctgtcatccagcacaccaactccctgagcaggcccaactcatttgacaagcctgagccttttgaaagagcctccccagtttctttccaggagctgaatagaacggggaagtccgggtctctaaaagtgataggaatctcccaagaggaaagtcacccttctcgggacgggtctcatcctcaccagcttgcactatcagacgctctcagaggagaacttcaggaaagctccagaaagagtccaagtgaacgacatgtgttaggacagccctcaagacttgtccggcagcacaacatccaagttccagagattttggtcacagaagaaccagatcgagacctggaagctcaatgccatgatcaagaaaagtcagagaagttcagttggccccagcgtagtgaaaccttgtcaaaattgccaacagagaaactgccacccaaaaagaaaaggctccgtctggctgagatagaacattcctcaacagaatcgagctttgattccactctctccaggagtctaagtagggagagcagtttatctcacacttcaagtttctcagcctctttagacatagaggacgtttctaaaacggaggcttcccccaaaatcgattttctaaataaagccgagtttcttatgattccagctggcttgaatactctgaatgttcctggatgtcaccgggaaatgaggcgtactgcatcagaacagattaattgcacgcaaacgtcaatggaggtctctgatctcagaagcaaatcattcgattgtggaagcatcaccccaccccagacaacaccacttactgaattgcagcctccatcttcaccttctcgagtgggagtgactgggcatgtgcctctcttagaaagaaggagaggcccactggtacggcaaatatctttaaacatagccccagatagtcatctgtctcctgtacacccaacatctttccaaaatactgctcttcccagtgtgaatgcagtgccatatcaggggcctcagctcactagtacatctttagctgagttttctgcaaatactttgcactctcagactcaggttaaggatctgcaggcagaaacatcaaactccagctctaccaacgtttttcctgttcaacagctctgtgatatcaatttgttaaatcaaatccatgcaccgcctagccaccagagcacacagctatctctgcaagtgtctacgcagggtagcaagccagataaaaattctgttttatctgggtcttctaaaagtgaggattgctttgctcccaaataccaattgcattgtcaggttttcacttcaggcccatcttgctcttctaatcctgtgcattctttgccaaatcaagttatttcagatccagttggaacagatcattgtgtgacatcagcaacattaccaaccaaattaattgacagcatatctaattcgcatcctctgctaccaccagagctcaggccccttggaagtcaggtgcagaaggtgccatcatcattcatgctgcccatacgcctgcagagtagtgttcctgcttactgttttgctacactcacatccctgccacaaatactagagacccaagatctgcccaatcagccaatttgccagactaatcatagtgtagtgccaatcagtgaagaacaaaattctgtgccaacattacaaaaaggtcatcagaatgctttgccaaacccagagaaggaatttctatgtgaaaatgttttttcagagatgagccaaaattcttctctatcagaatccttgcccataactcagaaaatatctgttggtcgactttcccctcaacaagaatcttcagcttcgagtaaaaggatgctttccccagcaaatagtttagacattgccatggaaaagcaccagaagcgggccaaagatgaaaatggagctgtttgtgcaacagacgtgagacctttagaggctttgagttcgagagttaatgaagctagtaaacagaagaagcctattttagtgagacaggtttgtactacagagcccctggacggtgtgatgttggaaaaggatgttttttctcaacctgaaattagtaatgaggctgttaatttgacaaatgttttaccagctgataattcatcaacaggatgctctaaatttgtcgttatagaacctataagtgaattgcaggaatttgaaaacatcaagtcatccacatcattaactcttacagttcgaagttcacctgctccttcagaaaatactcatatttctcctttgaaatgtacagacaataaccaagaaaggaagtctccaggggttaaaaatcaaggtgacaaagtgaacatccaagagcaaagtcaacagccagtcacttctctttcattgtttaacatcaaggacacccagcagctggctttccctagcctgaaaactacaaccaactttacatggtgttatctcttaaggcagaagtcgttgcatttgcctcagaaggaccagaaaacttcagcctatactgattggacagtaagcgccagtaatccaaatccactcggtttgcccacaaaagttgcacttgctctccttaattcaaaacagaacactggaaaatcactatactgtcaagcaataactacccattccaagtcagacttattggtctattcaagcaagtggaaaagcagcttaagcaagagagcattaggtaatcaaaagtccacagtagttgaattcagcaataaagatgcctctgaaattaacagtgagcaagataaagaaaattccttaatcaaaagtgaaccaagaagaattaaaatatttgatggaggatataagtcaaatgaagagtatgtatatgtccgaggcaggggaagaggaaaatacatttgtgaagaatgtggaatacgttgtaagaaacctagcatgttaaagaaacacatacgaacccatacagatgtccgcccctaccactgcacttactgtaacttctcctttaagactaaaggaaatctgacaaaacacatgaagtccaaggcacatagcaagaaatgtgtggatttaggcgtctcagtaggtttaatagatgaacaggatacagaagaatcagatgaaaaacagagattcagttatgagcgatctggatatgatcttgaagaatctgatggcccagatgaggatgacaatgaaaatgaagacgatgatgaggacagccaggctgaatcagtcctgtcagccacaccctcagtcacagctagcccgcagcaccttccatctagaagtagccttcaggaccctgtgagtactgacgaggatgtcaggatcaccgattgcttttctggggtacacacggacccaatggacgttctgcccagggcgctgctcaccagaatgactgtcctgagcacagcacagtctgactacaataggaagacactctctccggggaaggctaggcagcgtgctgcgagagatgaaaacgacacaattccgtctgtagacacttccaggtccccgtgtcatcagatgtctgtggactaccctgagtcagaagaaattctgagaagttctatggcaggaaaagctgttgctataacacagagcccatcatctgtaagacttcctcctgctgcagctgagcacagcccccagacagcagcggggatgccttctgtggcctcaccacatcctgaccctcaagaacagaagcagcaaataactctacagccgactccaggcttgccttctccccacactcatttgtttagccaccttcctttgcattcccagcagcaatcgaggacaccttataatatggttccagttggggggatccatgtggtacctgctggcctcacatactccacgtttgtgccccttcaggctggaccagtgcagctcacgatccctgctgtcagtgtcgttcacagaactttgggtactcataggaatacggtcacagaagtgtctggcactacaaaccctgctggagtggctgaattaagcagtgttgtgccatgtattcctatcggccaaatccgcgtgccaggccttcagaacctaagtaccccaggcttgcagtcactcccctcgttaagcatggaaaccgtcaatattgtaggcctagccaatacaaatatggccccacaagtccatccaccaggactggctctgaatgctgtcggactgcaggttctgactgcaaacccttcatcacaaagcagccccgcccctcaggcacacattccaggtctccagatcttgaacatagcattgcccaccttaatcccctcagtcagtcaagtagccgttgatgcacagggagctccagaaatgccagcttcccaaagcaaagcatgcgagacacaacccaagcagacttctgtagccagcgcaaaccaggtcagcaggaccgagtctcctcaggggttacctacagtccagcgggaaaatgcaaaaaaagttctgaatccacctgcccctgcaggtgaccatgcaaggcttgatggcctgagtaaaatggacacagagaaggctgcctcggcaaatcacgtgaagcccaagcctgaactcacttccatacagggccaaccagcgtccacgtcacaacctctgctgaaggcacattctgaagtttttacaaagccctcaggccagcagactctctctccagacagacaggttcccaggcccacaggactaccgcggaggcagcccactgtgcacttcagcgacgtgagcagcgatgatgacgaggacaggcttgtgatagcaacctgatggattttattttttatttgctttttttttatataacacttaaaggtttctttgaaaaccctcctttccttaaagcacatttttctgacataaactcatgactaactttgtgcaatcatgaacttttgaccaataattgttgttttgtgtcagctccagccatttttgtacatgttgtatagacaattgtgccttttaggagctttatgtttagaaactgtacagattgttgaatatctatatacataaaaatatattatatatgtatatgaaaaccaggtagttatttgtgtttagtaaggaaaacctgtcaaataaatcaaatgattaaattatatgttccactgttgaatataaattttatggctatggggcagagtttctgtgtataaattagtatgtaaactccatatttattgtattcatattagtctttgaaaatgggtctgtcctccttgtgtaagacagtaactttacacttcagacagattttctgtgttatgaaatgtttcagtaaaatattgtttactg

SEQ ID NO: 28933 - DNA, 2114 bp, Homo Sapiens
cgcggaatccggaagaacacaatggatctggtgctaaaaagatgccttcttcatttggctgtgataggtgctttgctggctgtgggggctacaaaagtacccagaaaccaggactggcttggtgtctcaaggcaactcagaaccaaagcctggaacaggcagctgtatccagagtggacagaagcccagagacttgactgctggagaggtggtcaagtgtccctcaaggtcagtaatgatgggcctacactgattggtgcaaatgcctccttctctattgccttgaacttccctggaagccaaaaggtattgccagatgggcaggttatctgggtcaacaataccatcatcaatgggagccaggtgtggggaggacagccagtgtatccccaggaaactgacgatgcctgcatcttccctgatggtggaccttgcccatctggctcttggtctcagaagagaagctttgtttatgtctggaagacctggggccaatactggcaagttctagggggcccagtgtctgggctgagcattgggacaggcagggcaatgctgggcacacacaccatggaagtgactgtctaccatcgccggggatcccggagctatgtgcctcttgctcattccagctcagccttcaccattactgaccaggtgcctttctccgtgagcgtgtcccagttgcgggccttggatggagggaacaagcacttcctgagaaatcagcctctgacctttgccctccagctccatgaccccagtggctatctggctgaagctgacctctcctacacctgggactttggagacagtagtggaaccctgatctctcgggcacttgtggtcactcatacttacctggagcctggcccagtcactgcccaggtggtcctgcaggctgccattcctctcacctcctgtggctcctccccagttccaggcaccacagatgggcacaggccaactgcagaggcccctaacaccacagctggccaagtgcctactacagaagttgtgggtactacacctggtcaggcgccaactgcagagccctctggaaccacatctgtgcaggtgccaaccactgaagtcataagcactgcacctgtgcagatgccaactgcagagagcacaggtatgacacctgagaaggtgccagtttcagaggtcatgggtaccacactggcagagatgtcaactccagaggctacaggtatgacacctgcagaggtatcaattgtggtgctttctggaaccacagctgcacaggtaacaactacagagtgggtggagaccacagctagagagctacctatccctgagcctgaaggtccagatgccagctcaatcatgtctacggaaagtattacaggttccctgggccccctgctggatggtacagccaccttaaggctggtgaagagacaagtccccctggattgtgttctgtatcgatatggttccttttccgtcaccctggacattgtccagggtattgaaagtgccgagatcctgcaggctgtgccgtccggtgagggggatgcatttgagctgactgtgtcctgccaaggcgggctgcccaaggaagcctgcatggagatctcatcgccagggtgccagccccctgcccagcggctgtgccagcctgtgctacccagcccagcctgccagctggttctgcaccagatactgaagggtggctcggggacatactgcctcaatgtgtctctggctgataccaacagcctggcagtggtcagcacccagcttatcatgcctggtcaagaagcaggccttgggcaggttccgctgatcgtgggcatcttgctggtgttgatggctgtggtccttgcatctctgatatataggcgcagacttatgaagcaagacttctccgtaccccagttgccacatagcagcagtcactggctgcgtctacccgcatcttctgctcttgtcccattggtgagaatagccccctcctcagtgggcagcaggtctgagtactctcatatgatgctgtgattttcctggagttgacagaaacacctatatttcccccagtcttccctgggagactactattaactgaaataaatactcagagcctg

SEQ ID NO: 28934 - DNA, 591 bp, Homo Sapiens
cagaacggccgatctccagcccaagatgattccagcagtggtcttgctcttactccttttggttgaacaagcagcggccctgggagagcctcagctctgctatatcctggatgccatcctgtttctgtatggaattgtcctcaccctcctctactgtcgactgaagatccaagtgcgaaaggcagctataaccagctatgagaaatcagatggtgtttacacgggcctgagcaccaggaaccaggagacttacgagactctgaagcatgagaaaccaccacagtagctttagaatagatgcggtcatattcttctttggcttctggttcttccagccctcatggttggcatcacatatgcctgcatgccattaacaccagctggccctacccctataatgatcctgtgtcctaaattaatatacaccagtggttcctcctccctgttaaagactaatgctcagatgctgtttacggatatttatattctagtctcactctcttgtcccacccttcttctcttccccattcccaactccagctaaaatatgggaagggagaacccccaataaaactgccatggactggactc

SEQ ID NO: 28935 - DNA, 13204 bp, Homo Sapiens
ctgcaggtcaacggatctgctagggtcctcctatcagcacacacactccagccccactttagaggtacccgctaccttccctcattaaaaccagctctcaagaggggatctggtaacagtctaggcaggcattccagggagcatgtgaaccgctggttcttgttgcgggtggaggatggaggtgttgtacagagtttaggtctttttcagcaaagatctccaaaccccgggtgttcaaaatcaaaccaaaggggattatagtcccagctctactcacaactcactggttactttagccacgagattgccctcgctgagagtcggtttcactgtccataagatgaagaagtacatcacggtggtctgtgaggtgtcattgaggaaagatggtccagtgcccccatgccacatggccttcgggcagtgctcccagcgccggcgccagggcctgggatacgctggaatctgcgcggcgctcacccagctttcctatgcagagtggccatcgtggtgggcgccccgcggaccctgggccccagccaggaggagacgggcggcgtgttcctgtgcccctggagggccgagggcggccagtgcccctcgctgctctttgacctccgtgagtcccaggcaaggagagcaaggttggggtcagagggacgtggactgcccgggcttcagcgccccaccccttcttgtgccttccaggtgatgagacccgaaatgtaggctcccaaactttacaaaccttcaaggcccgccaaggactgggggcgtcggtcgtcagctggagcgacgtcattgtggtgggccccgcggtacagggcacagggaacaatcgggggcagggacactggggccaggaggagcccaagtctcgcgccccgtccccatctgtggccctttctcaggcctgcgccccctggcagcactggaacgtcctagaaaagactgaggaggctgagaagacgcccgtaggtagctgctttttggctcagccagagagcggccgccgcgccgagtactccccctgtcgcgggaacaccctgagccgcatttacgtggaaaatgattttagtaagcgccagctacgacctggccccgcccactcgcgacggcttggccccgccccccatcggatcccgcccccagcgccgcagcccttgctttggatctggcctcgccccagggccccgccgactcaaggccccgcccctgtcccccagccctcctccgggctcgcgcgcgcctcccttcacccctgggctgacccctcctccttgtctcctcaggctgggacaagcgttactgtgaagcgggcttcagctccgtggtcactcaggcgagtagggagcaaaagcgcagtgggggcggctcccaaacagggccccctctcaccctcaggacttcccttccaggccggagagctggtgcttggggctcctggcggctattatttcttaggtacgtgcccatccgtacacctccctcccttctcgcggccgaaggagaccgctttgggcttcacacccgctgtccctcccgccctaggtctcctggcccaggctccagttgcggatattttctcgagttaccgcccaggcatccttttgtggcacgtgtcctcccagagcctctcctttgactccagcaacccagagtacttcgacggctactggggtaacaccgccattccagacttccagcaccccgagggtcaccgcccaccgcagacggtcaggtcctgcccctgtgggagcctccatggccacccctgccggccaacccaccgcctaagccgctcccgccctccgctcctgcgcttccccgcagaccgcccacctcccatgcgcccaccgctcccttccactgcggactcgtagcgcagcctggggcagggcttggcccctcgaaggcctccgtttttccatctgcacaatgcagggctggggctgagtggccttaatctcctccttctttgccctccgtcccctctgtgcttcctcccctggaaaagactaatttgcgcccttgtcctcagggtactcggtggccgtgggcgagttcgacggggatctcaacactacaggcaagaaatccacttagggcgggagttgggtagcccagcccggggaggagcgccttcctgaaatctcccctatgtagctgggtgcagaacggggagcgggaagtgggtaggttctaaggctctcattccctgagcctggctctccctatcgccagaatatgtcgtcgtgccccccacttggagctggaccctgggagcggtaagtgcccccaccactgggcctcccgaagccccttatcccagttctcaggctgacaactcctgagcgccccccacccccgccccgcctccaccaaaccaccctttctcacctggagtgggaggttgctttgggtacaagaatgatgctctcgcctgcgctgtccgtgcaggtggaaattttggattcctactaccagaggctgcatcggctgcgcggagagcaggtgggggccaggtcccagtgggcgtggctgggtggagggggaactgagacttcagaatatttcatgggaggtgagggcccatttcttaaagaggatgcttgtccagcggcgtgaatgatggtgctcctcatcttgcagatggcgtcgtattttgggcattcagtggctgtcactgacgtcaacggggatgggtgaggagggacatgcccccacccctacccagttgggtcccaaattaccagagctgcccctctgtctccctttcctagccctagtctcacgtatccactggaggaacaggagagcaagggtcgaggagatttggccctagccccaatatacccctggtccagtcccatgtaaccactcatctggcccacaggaggcatgatctgctggtgggcgctccactgtatatggagagccgggcagaccgaaaactggccgaagtggggcgtgtgtatttgttcctgcagccgcgaggcccccacgcgctgggtgcccccagcctcctgctgactggcacacagctctatgggcgattcggctctgccatcgcacccctgggcgacctcgaccgggatggctacaatggtgagggaagagaggagccctacttgctgcagaggggttaacagccactcaaaaagcatggagttggcctgagggcagccagaaccaggatgggttttaagcatataagtatgtggcttagacacatggggtgctgagtggagagcagatgggagagttgaagactaattaggaagtgtttgccttaatccaagcaagagacaatgaccacctggatgtggattttggcagtggagttagagatgggagtgacttcacagatatttaggactcggattattaggacttggtgggagactggatgtggggccaggggagaggttggagttgggtgcctgtgatggcctccactgcctggaactcaggccgtgcagcaggtgctggggagaggcgggagatcagcagttcagctctggacctgttgagcttgaagggcttgggtgctttaggcggaaatatccaaagaacagttgggagtggctctccccgcttccacaagagagatctgaatgggagacaggggtttggggaaagtggatgaggtcccgggacctgtgaaataagaggcccaggatagagccctagggagcaaaagcatttaggtgactcctacaggaggtaagtctgagaaggagacagaggagtgtccagagagggaggagggaacccagggggtctgatggcccgggactcaaggaagagcatgcgttaaagagcatgcacaggaggaagtgggcgctgcagctcctgctgctgctgcaagatacaattaggtggggctggagaaatattcatgggctttagcaagaagagggtgccaggcatggtggctcatacctgtaatcccagctacttgggaaattgaagcaggagaatctcttgaacccgggaagtggaggttgcactgagctgagcttgcgccactactgcactccagcctgggtgacagagcaagactccatctcaacaaaataaaaaaaaaaatagagaaagaaaggaagaaagaaaaaagaaggggaggttattggtgacagtgacataaattgattcaggccaagatagggtcagaagccagaatgcaatggggtaaggtatgaatggagatgaaaaattggatgcagctaatgtagacagctctttcaacaggtttgtggtaaaaaggaatttgaggaatagaaaggaaaaaaaaaaacatgtttgactataagaggaaaaagagaaaaggtgatcacagaaaagagatgagggtcaagggaagattatttcaatgtggaagaacatgtagtaggttgaaaatgatgttgtggggaaatggggggatgagccagcagagagtccctgtgatgcctcagggggtgggagggtgactggcccagtgtcagggtgaaggaaggaaacctcttccagggtcaaatggggaaagggaaaaagaaagttggtgtgggattatagcataacagtgggctgcctctcttcctgaagtaagagattacgtcacctgctgaaggaagtgtggggggtctgggagtttgatggaatggagaaggctagaaatagatgctagatggccaggcacggtggctcacacctggaatcccagcactttgggaggccgaggcaggaggatcactggagcctaggagtttgacaccagcctggccaacatagggagatctcgtctccataaaaatttttaaaaattagctgggcatggtggctatagtctcaactgcttgggaagctgaggtgggaggattgctttagtccagaaggttgaggctgcagtaagccatggttgcaccactgcacttcagcctgaatgacaagtgcaagactgtcttaaaataaaaaatttaaagggcttgggcacggtggctcacacctgtaatccagcactttgggagcccaaggtgggcagatcacttgaggtcaggagttcgagatcagcctggccaatgtggtgaaaccccgtctctactgaaaatacaaaaattagccgggcatggtggtaggcgcctgtaatcccagctactgaagaggctgaggcacaagaatcactttaacgggggaggcagaggttgcagtgagccgagatcgcaccactgcactccagccaggacaacagagcgagactccatctcaaaaaaaaaaaaatttagaaaagggaataatgatgcttaattttcaggatatattttcctcaatagacagtgagagttgtcactgtttttataacaatcctacttggcaggtccctctcccacctgattgttaactcctggagggtagggcagtgcctccttcacccacactttgcacccctttcctagtctcctgggatgttcccagagaagctcaggaaagttttacagtcatctagggaggctgaataacaatcagccacttcctttctgttactccttccagacattgcagtggctgccccctacgggggtcccagtggccggggccaagtgctggtgttcctgggtcagagtgaggggctgaggtcacgtccctcccaggtcctggacagccccttccccacaggctctgcctttggcttctcccttcgaggtgccgtagacatcgatgacaacggatacccaggtgccctggactgcctccagctagaaatgcccaagaaaggcccttggacattcgctggaagtgccaagagacacggccagggctcatgcctggcctggtgtcccactatggactgccagaggggctgggtgaaacctccagtgggggaggtggtgtggggaacccctgggaagatgagatgaggatccccataccctaatcgccaattctgacccattcctcgatgtctatagacctgatcgtgggagcttacggggccaaccaggtggctgtgtacaggtgagcactggctccaggggcgggatggggaaggtcctgtgccatcaagaggaggccaggccaggaggagccacaatggcaagcctccccatcaccctatcccatcagagctcagccagtggtgaaggcctctgtccagctactggtgcaagattcactgaatcctgctgtgaagagctgtgtcctacctcagaccaagacacccgtgagctggtgaggaggcagagggcatgggccttaaaggatctgggacctcagaaaggctccaacccctgagccccacttacgtctttgcagcttcaacatccagatgtgtgttggagccactgggcacaacattcctcagaagctatgtgagtggcatgaagggggcaggagggaggtgggcttggactcccccggaggctggccagggaggtcctgactcttctgcttgccctgccagccctaaatgccgagctgcagctggaccggcagaagccccgccagggccggcgggtgctgctgctgggctctcaacaggcaggcaccaccctgaacctggatctgggcggaaagcacagccccatctgccacaccaccatggccttccttcgagtacgcccaggcaggggattggcagggctgggagagtagaacttacccactggacttgttcatctagccctggggcactgagctgggtgctgtgagtccgggggtggtcaggacacaggtgcctactggccaggagaaggtgggatgtgtatggtagcaagatggcctgactcttgcccctgtcctaggatgaggcagacttccgggacaagctgagccccattgtgctcagcctcaatgtgtccctaccgcccacggaggctggaatggcccctgctgtcgtgctgcatggagacacccatgtgcaggagcaggtagggacaggcagggacaggccagggaggtgcaggacccctgatagcaaatcaggattagggttagtgccaagtcacaatgtaaccccaaaaccttgatgtcattccaaaccctaatgaaaacctcaaaatccagccagtcatggtggctcacacctgtaatcccagcactttgggagaccgaggcaggcagattgcctgaggtcaggagttagagaccaacctggccaacatggtgaaaacccatctctactaaaaatacaaaaaaaattagccgggtgtggtgacgcatgcctgtaattccagctactcgggaggctgaagcaggagaatcacttgaacccaggaggcagaggttgcagtgagccaagagtgtgccacagcactccagcctgggtgacagagcaagactctgtctcaaaaaaaaaaaaaaaagccaggcgcagtggcctcacgcctgtaatcccagcactttgggaggccaaggcgggtggatcacgaggtcaggagatcaagaccatcctggctaacacagtgaaaccccgtctactaaaaatacaaaaaaaaaaaaaaaattagctgggcgtggtggcgggtacctgtagtcccagctacttgggaggctgaggcaggagaatggcgtgaaccccgggggcggacgttgcagtgagccgagatagtgccactgcactccagcctggacgacagagcgagactccgtctccaaaaataaaaaaacacctgaaaatcccagtatcccctaagctctgatgtaaattgacaaaccctgacattgtcccaaacctccaaatataacccgagccccgataccatctacaaactccttttcgtcctcagatcttcttactccctaagcccctatgtgaaccccaagcccactgttttcctaaccctgatgtaatccctaaacctcacacatccccaacttacccgcacaccccaatgtgcccctctagacacgaatcgtcctggactgtggggaagatgacgtatgtgtgccccagcttcagctcactgccagcgtgtgaggaggcctcccattctgcccgaccctggccctttctgcctatcatacctgctccacaccttagtcccctcttttcccacatcctgggcccagacccaggctccctggcttcactcctctttccccacaggacgggctccccgctcctagttggggcagataatgtcctggagctgcagatggacgcagccaacgagggcgagggggcctatgaagcagagctggccgtgcacctgccccagggcgcccactacatgcgggccctaagcaatgtcgaggtatggcccccaccctgggaacagtacccgggacctgggaggcactggagccttggctctctcatctccctccctgagagtccctcttctcttctgctttgctgtcaaagatgtaattttttttttaatttggaggaggatacttgctaatggtcagtcagaattccaaaactctattacaaaaaccagaaaaacaaaaaaggtttaggaaccaaatgttaacaggaacctctgttaacatttggtggatttccttccagtctttttttcaatattgactcacactcacataagtatatatttattttttatgttgttaatatagtttataataatgggggtcatactctaatgttttgtgttttttatttccaaaatgaaaatgcctaaaaagtagtagtgctacagcaatacacacactagcatgtgacagtcccttgagcgaccccaccccaagaaacccccccctccctaccttggcacacaaatctttccagaccttccaagggagcttaaatatatatatatgatgctctgtaatttctttcttggaactgccttcctgaagggctttgagagactcatctgtaatcagaagaaggagaatgagaccagggtggtgctgtgtgagctgggcaaccccatgaagaagaacgcccaggtgaggctgctgggtcgtggtaccgggtctccaccaggggctcatgaataaccagattttaggggtgaggttttagagccacatagttctgggccagaatcttggtcctcacactccctttgccaacattgtccttgggtgagtgactttccctctctgagcccctttaccagtgggcttccaggtaaaatagaaataataatggtggcctggtgcggtcgtcacgcctgtaatcccagcactctgggaggccagagcgggtggatcacgaggtcaggagttcaagaccagcctggccaacatagcaaaaccccgtctctactaaaaatacaaaaattacccgggcatggtggcgcacgcctatagtcagagctactcgggaggttgaggcagaaaaatcacttgaacctgggaggtggaggttgcagtgagccgagatcatgccactgcactccagcctgggtgacagagtgagactccgtctcggaaaaaaaaaaaaagaaaaagaatagtggtgatcttggagggtgaagactggaggccacattcagggcagggctgtcctaagtggggcacttgggcagtgaccttggccctcctcatctcccagataggaatcgcgatgttggtgagcgtggggaatctggaagaggctggggagtctgtgtccttccagctgcagatacggaggtactgacctggcgagcgtgcctacccaccacccttcccccgtctgacccccgtgcagagcccctcaggtcccttccatacagaagggtctttcgaggccaggcgcagtggctcacacctgtaatcccagcacgttgcgaggccaaggcagaaggatcactggaggtcaggagttggagaccagcctggccaacatggtgaaaccccatctctactaaaatataaaattagctgggcatggtggtgcgcacctacaatcccagctactcgggaggctgaggcaggagaatagcttgaaccgaacctgggaggtggaggttgcagtgagctgagattgggccactgcactccagccttccagcctgggcgacagtgcgagattctatctcaaaagaaaaaaaaaaaaaggtcttgaagaagcctggttccctttcttcctcagagatttagcgagtcttggagccctagaggaagttctttcccaggtctaacttcagtgtggcatgctctttgtataattagctctctctgaactctctaaaattctggcctcacccccagaaagtcactgggctggtgtccctggccctgtttctcctcatcccctcccctctagcaagaacagccagaatccaaacagcaagattgtgctgctggacgtgccggtccgggcagaggcccaagtggagctgcgagggtgagaggccaggggtggagaagggagatggcattcagggctctaaactccagggggcgctggggaaacctcacaggccaatcagggcatcacactctctctgggggtcttgggcacctgcaggaactcctttccagcctccctggtggtggcagcagaagaaggtgagagggagcagaacagcttggacagctggggacccaaagtggagcacacctatgaggtattggggagcctcgcgtccctggctggggtgagcgggtcctcagaactccgggtgaggcgctaagctccccacaccctgccaccaccaccccttcagctccacaacaatggccctgggactgtgaatggtcttcacctcagcatccaccttccgggacagtcccagccctccgacctgctctacatcctggatatacagccccaggggggccttcagtgcttcccacagcctcctgtcaaccctctcaaggtaagagctgggtggaagaaagacctgggaaggcggccccagaccaaccaccggggcacctctgtgggctggggttcgggggagacctgggcctgaccactcctttgcccccccaggtggactgggggctgcccatccccagcccctcccccattcacccggcccatcacaagcgggatcgcagacagatcttcctgccagagcccgagcagccctcgaggcttcaggatccagttctcgtagtgagcaggctctctggtctcgggcccggcctccccgggacccacggggcagaggggatgggaggagggagaggggtccgggtgtgctgtgggcctctgtgggccacgcttggtccctgggagcacttcaagtgaacatggaggagcatgctggcttgtgtctggggtgagctgaaagacacttgcactttttaaaagcttcccagtacgttaaggagcataaaacaatgccaaagcaaggttatcatagatctgagcattgtgcgctgggggatgaccctccctgcatctctgggactatgtgagcaagcccgtggaaagacagcatccgaagcttggatccaaggcccttcctgatgggaaggccaccgcttcctgaacccccggccccttctgcgttgggtcctgggggtaagggggtgggggatgatggggtgatgggccgggacggctggggactgacgatgcttcccctcagagctgcgactcggcgccctgtactgtggtgcagtgtgacctgcaggagatggcgcgcgggcagcgggccatggtcacggtgctggccttcctgtggctgcccagcctctaccaggtggggtgggccgtggtggggcggggccgggccttctgggccgggaccactttgctctgggaggggcggggtttggtgtgggagggcaggaagagagggaaggcaaggtttactttgggggattgcagtgggattaggtcagaggcagggcttccccgccgggtgtgggacctggactccgtgcaaccaataggcctcttgtgggtgtaaacggctttcaaccccaacctgtccagaggcctctggatcagtttgtgctgcagtcgcacgcatggttcaacgtgtcctccctcccctatgcggtggccccgctcagcctgccccgaggggaagctcaggtgagtgtggggggatggagcagagaccagtcctgcaggacccattgtcccccagtcagtgcccagccagaaaagtctgaggggtggtacgggtgggtggcatggctggaggtcaccagcctgaggtttgagtctttgtgaaaggcaggtgtcaaggtgactgaggagacacgtgggtttgccccaggtgtggacacagctgctccgggccttggaggagagggccattccaatctggtgggtgctggtgggtgtgctgggtggcctgctgctgctcaccatcctggtcctggccatgtggaaggtgaggtgtgaaggacggtggagtccccagcggggcacaggcttggctctgccctgcctcacagggagtcaaggagagatggtggcccacccaagtgggtaatccagggaccaggggtctatgtctccactattagaatgtcattctcgtccaggggggtggctcacacctgtaatcccagcactttggcaggcaaagcgtttagatcacctgaggtcaagagttcgagaccagcctggccaacatggtgaaaccccatctctactaaaaataccaaattagccgggcgtgttgacacatgcctgtaatctcagctactcgggaggctgaggcagtagaattgcatgaacccaggaggcggaggttgcagtgagccgagatcacaccactgcactccagcttgggcaacagagcgagcctccatctcaaaaaaaaaacaaaaaaatagaatgtctttctctagtagagcaaaaggcaaaacaaacacaaaaatgtcattctcctgggaacccttccagacacataccactggaaaggatagcacctgaaattctgaggcctttagacacccctgccaccaaaaagattcagaggatatagagggtatagagggtgtaagtcctgccttcaggaattcctggctggtctcaaggacaagatgcacttcttcctagccctgcccttccccttgagtgaggaagaggccaaggattggtctagaccctattccataccttcctatgtggccctggagggtcactcgctcctctgcacctggaggagtctcaagcacactgaagggaagacatggtgcttttagggaaaaccacgcactagacccacaataatcaaatacatatcatcatatgctcgagtcatgcagacacaaacttcagtataagaaaaattccaggctgggcgttggtggctcacaccggtaaaatcccagcactttgggaggccgaggtggg

SEQ ID NO: 28936 - DNA, 6704 bp, Homo Sapiens
cctaggcccgggtcccggatccccgcgcacccggccaggctctggcacgttttgggggaggtgcctgcaggacccaacatactcaatgagcttccagcgcaatgtccgatcgctcggggccgactgccaagggaaaggatggaaagaagtattcctcgctcaacctgtttgatacgtataagggcaagtccttagagatccagaaacccgcctgttgcccctcgccatggcctgcagagtctcgggaaagttgccattgcccggcgtatcgacctccagccaaccttccaagcctgaaagccgagaacaaaggcaatgaccccaatgtctcactagtgccaaaagacggaacaggatgggcaagcaaacaggagcagtccgaccccaagagttccgatgcctcaaccgctcagccgccggaatcgcagccactgccggcttcacagacgcctgcctccaaccagccgaaacgacccccagcagcccccgagaacactcctttggttccaagcggggtaaagtcctgggcacaagccagcgtcacccatggagcacatggagatggtggaagggcatcaagcctactgtcacgattctctcgagaggaatttccgaccctgcaggcggctggcgaccaggacaaggctgccaaggaaagggagtctgccgaacagtcgtctgggcccggaccaagcctccgcccccaaaattctacaacttggagggacggaggtgggcgtggccctgatgagctggagggcccggactccaaacttcatcatggtcatgatccccggggtgggctacagccttcaggcccaccccagttccctccctaccgcggaatgatgccgcctttcatgtatcccccatatctcccgttccctccgccctatggaccccaggggccttaccgataccccactcctgatgggcccagccgttttccccgtgtggcgggcccccgaggctcagggccaccaatgcgcttagtagagcctgtgggtcgtccctctattctcaaagaggataatctcaaagagtttgatcagttggatcaggagaatgatgatggttgggcaggggcccatgaagaggttgactacactgaaaagctcaagttcagcgatgaggaagatgggcgagactctgatgaggagggagctgagggccacagggattcccaatcagcttctggtgaggaacggccccctgaagcagatggcaaaaagggcaactcccccaacagcgaaccgcccactcctaagacggcctgggcagaaacctctcggcctccagagacagagccgggacctcctgccccaaagcctcccctaccccctggggactacccagatcgtgggggtcctccctgcaagcccccagcacctgaagatgaggatgaggcatggcggcagcgacgaaagcagtcgtcatctgagatttccctggcagtggagcgggcccggcgacggcgagaagaagaggagcggcgcatgcaagaagagcgccgggcagcctgtgctgagaagctcaagcgactcgatgaaaagtttggggcacctgacaagcggctcaaagcagagcctgctgccccacctgctgccccttctaccccagccccaccacctgcagtccctaaagaactccctgcacctccagctccacctccagcatcagccccaacaccagagacagaacctgaagagccagcacaggcccctcctgcccaatctactcctactccaggtgtggctgcggctcccactctggtgagtggtggtggcagtaccagtagcaccagcagtggcagcttcgaagccagcccagtggaaccacaactgccctcaaaagagggtcctgaaccaccagaagaggttcctcctcctaccacacccccagttccaaaggtggaacccaagggtgatgggattggtcccacccgccagccccctagtcagggcttgggctaccccaaatatcagaagtcgttgcctcctcgtttccagcggcagcagcaggagcagctcctgaagcagcagcagcagcaccagtggcagcagcatcaacagggctctgcccctcctaccccagtgcccccatcaccaccacagcctgtgaccctgggggctgtgccagctccacaggctccacccccgccccccaaggccctgtacccaggtgctctgggccggcccccacccatgcccccaatgaactttgatccccgatggatgatgattcctccttatgtggacccccggctcctccagggtcgtccccctctagagttctaccctcctggtgtgcatccctctggcctagttccccgagagcgttcagacagtctggggctcagctcagagccatttgaccgtcatgcacctgctatgttacgggaacggggcactccaccggtggatccaaagttggcctgggtaggagatgtcttcaccgccacacccgctgaaccccgcccacttacctcacctctgcgccaggctgcggatgaggatgacaaggggatgaggagcgagactcctccagtacctcccccaccaccctatctggccagttatccaggctttcctgagaatggagcccctgggcccccaatctctcgctttcctctggaggaaccagggccccgtccactcccctggcccccaggcagtgatgaagtggccaagatacaaactccaccacccaagaaggagccccctaaggaggagactgcacagctgacggggccagaagcaggccgaaagctgcccgcgagtcggagtggagcaggccccccaccaccacgcagagagagtcgcacagagacccgctggggccctcgtccagggagcagtcgtcgtggaatccctccagaggagccaggggccccaccccgccgggctgggcctataaagaaacctccaccacctacaaaagtagaagagctgcctcccaagcccctcgaacagggggatgaaacccccaaacccccaaagccagacccactcaagataaccaaggggaagctagggggccccaaggagaccccacccaatggaaatctttcccctgccccaaggcttcggagggactattcgtatgaaagagtgggtcctacctcttgccggggtcggggccgaggcgagtattttgccagagggaggggttttcgggggacctatgggggacgagggcggggaggccaagcgaattccgcagttaccgagagtttcgaggagatgatgggcgtggaggtgggacagggggaccaaaccaccctcctgctccccgaggccgccatgccagcgagacacggagcgagggttcagagtatgaggaaatccccaagcggtgccggcagcggggctcagaaacaggcagcgagacccatgagagtgatctggctccttcagacaaggaggctcccacacccaaggagggaacactcacccaggtcctctcgctcccccaccaccaggagccccacccttcaccgagcgccagcccgcttcacgtgcccgggggtcggcgagtcttcactcccagagggtgccatctcgccggggccgaggaggagggaggcccctcctcaagtttgcccaggctggagccctccagccaagtctctggctcccaagaaacctcccacaggccctttgccaccaagtaaggagcctttgaaagagaagttgatcccagggcctctgtcccctgtggcgcgcggaggcagcaatggaggtagcaatgtgggcatggaagatggggagcgaccccgaaggaggcgacatgggagggctcagcagcaggataaaccgcctcgtttccggaggctgaagcaggaacgggagaatgccgcaagggggtctgagggcaagccctccctaacccttccagcctccgctcctggacctgaggaggccctcacaacagtcacagtggccccagcacctccgcgggcagctgccaagtctcctgatctgtcaaaccagaactcagaccaagccaatgaggaatgggagactgcatcagagagcagtgacttcaccagtgagcgccgaggggacaaagaggcacccccaccagtactgctgacacccaaggctgtgggaactcctgggggaggtggaggtggagccgtaccaggtatttcagccatgtcccgcggagatctgagccagagagccaaggatttgagtaaacggagcttctcaagtcagcggccaggcatggaacggcagaatcggcgccctggcccagggggcaaggctggcagcagtggcagcagcagtggaggaggcggtgggggtcctggaggaaggaccgggccaggacgaggcgacaagaggagctggccctctcccaagaaccgaagtcgtcctccagaggagcgtcccccggggcttcccctgcctcccccacctcccagcagttctgctgtcttccgcctggaccaagttatccacagcaaccctgctggcatccaacaggctctggcccagcttagtagccgtcaagggagtgtaactgcaccagggggtcatccaaggcacaagcctgggcctccccaagcccctcagggcccctctcctaggcccccaacccgatacgagccccagagggtcaacagcggcctcagttctgacccccactttgaggagccggggccaatggtgagaggggtgggtgggactcctcgggactctgccggggttagtccctttccccctaaacgtcgggagcggcctcccagaaaaccagagctgctacaggaggaatctttgccacctcctcatagctctggattcttgggctctaagcctgagggcccaggccctcaggcagagtccagagatacaggcacagaggccctgacccctcacatctggaaccgtttacatactgccactagccgaaagagttaccggcccacgtccatggagccttggatggagcccctgagtccttttgaggatgtggctggcacagaaatgagtcagtctgacagtggggtggacctgagtggggattctcaggtgtcatcaggtccctgcagccagcgaagttcccctgatggaggactcaagggggcagcagagggaccccccaagaggcctggaggctcctcacccctgaatgctgttccttgtgagggtccacctggctctgaacctcctaggagaccaccacctgccccccacgatggggacagaaaggagctgccccgggagcagcctctgccccctggccccattggcacagaacgatcacagcgtacagaccgaggcacagagcctggccccattcggccatcccatcgacctggtcccccagtccagtttggcactagtgacaaggactcagacttacgcctagtggtaggagacagcttgaaagcagagaaggagctaacagcatcagtcactgaggccattcctgtatcacgagactgggagctgcttcccagtgctgctgcctctgctgagccacaatccaagaacctggattctgggcactgtgtcccggagcccagctcctcaggccagcgcctgtatcctgaggttttctatggcagtgctgggccttccagttctcagatctctggggggagccatggactctcaattacatccaaacagtggaggcttcgccctgggacaccctcactgcacccttacagatcacagcccctatacctacccccgggcccagcccctccctcagcactgctctctggggtagctctcaagggccagtttctggatttctccacaatgcaagctacagagctggggaagttgccggctggaggagttctctaccctccaccttccttcctctactctccggctttctgccccagtcctttgcctgacacatcgttgcttcaggtacgccaggatctgccatccccttcggatttttattctactcctctgcagcctggtggccaaagtggctttctcccttcaggggctcctgcccagcagatgcttctacccatggtagactcacagctgcctgtggtgaactttggctccctgccgccagcaccacctcctgccccacctcccctttctctgttacctgtgggccctgctctgcagccccccagcctggctgtgcggcccccacctgctcctgctactcgggtgctgccttcacctgccaggcccttccccgctagcttggggcgagcagagctgcatccagtggaactaaagccgttccaggattatcaaaaactgagcagcaaccttgggggacctggatcatcacggactcccccaactggaaggtccttctctggcctcaattcccgtctcaaggccacgccttccacctacagtggagtcttccgcacccagcgcgtcgacctttaccagcaggcctccccaccagatgccctgcgctggatacctaagccttgggagcggacagggccgccacctcgagaagggccctcccgacgggcagaggagcctgggtcccgaggggacaaggagcctgggttgcccccaccccgctgagggagttcctcttgccccctacccccggggcttgtatatagattataaatatataagggggaaaggggtgggcggggaggggttgtggggctggggcctcacttcccctcctcccccttcccctggtcccctgtccctggggctgtttgttaaaaaagagtaataaaaggattt

SEQ ID NO: 28937 - DNA, 1773 bp, Homo Sapiens
  misc_feature (1691)..(1691): n is a, c, g, or t
ctgctctggggctgcctcttcagctcagactttctctgtgtctcctgcagacggaccagcaggctgaggccaggtcctacctcagcgaagagatgatcgctggtgagtgaggcgcggcaggctgggggctgggtggatgtatgctggggacatgttggcctctaggcagggtgggggttgggggggggtaggtgtgaggctgacagtccagcaggcctcacctctgccctctgccctccctcgcagagttcaaggctgcctttgacatgtttgatgctgatggtggtggggacatcagcgtcaaggagttgggcacggtgatgaggatgctgggccagacacccaccaaggaggagctggacgccatcatcgaggaggtggatgaggacggtgagcgggtgtccctcggaggcaggggatggtggggagaggcggcagcggctgggctcaggctcagtctgccacctgctgcccgcaggcagcggcaccatcgacttcgaggagttcttggtcatgatggtgcgccagatgaaagaggacgcgaaagggaagagcgaggaggagctggccgagtgcttccgcatcttcgacaggtgcgctgggggcccgggagccgagggaggggcttagcagtcagaacccggccggcagcgctggaagcttccccgtgttgggagtgcggaagcggggcgtcgagtgtggtggccagggcagctcgccccggccctgagccctgccctgtccctcggacccgaaggaatgcagacggctacatcgacccggaggagctggctgagattttcagggcctccggggagcacgtgacggacgaggagatcgaatctctgatgaaagacggcgacaagaacaacgacggccgcattgacttcgacggtgagggccaacgggagcttgggaagagcgggtgggagccccagaggacggcgggcactggtgcctggctccggtgcagtgtccttggccttgtgggctgggctgggcgtaacttcaccaagttccccatagtctcctgggggcaggtatagaagcgctccacgactctgtgcagtttatcaattaatgaccaggcaggggggcgtggtggctcaggactgtaaaatcctagaactttgggaggatgaggtgggaggattgcttgaggccaagagttcgagaccagcctgggcaacatagtgagaccctgtctttacaaaaaataaaataaaataaaaaggcaggtgtggtggcacacctgtggtcccagttgctccgggggctgaggtaagaggatcgcttgagcctaggagatcaaggctgcaatgagttatgattgtgccactgcactctaccctgggtgacagaccttggcgaccttggcaacagagtgagactctgtctcaacaaaaacaaaaacaaaaagtcatcccctctgtgtggctggagccctggcctggcctctgcgtccccagtgggacccctgaccctctccctctcctttccctcagagttcctgaagatgatggagggcgtgcagtaaggagtggacagtcgcctctaccaagatcgcgtgtccctagggtgtgggagactccgccctgccgggtctccaccagggaggcgcggccccttgtgggtctttgtctggaaggaataaaagcaaatgttccaaaactcgtggcctgaatgagggnagagccgaggacagcaggtcgcaagggctgtggtccagggcgccatcccggctggcaccacccggagcacccttggggatcc

SEQ ID NO: 28938 - DNA, 1526 bp, Homo Sapiens
ggtggagtgacagccggagcccgggcgccggcgcggggctcggtgacagcggaggcggcggcccgggcgggacgagggagcggccgcggcgccgacggcgggcgggaagggcggacggggcgggcctccctggtggcacggggccggagcaggccgggagcaggtggcgggcacagcttgcgggccaggcacccgaacttgcgacaagttgccggagccggggcgcgggcggcggacagattgaccttcagagcgagggagccagcgccggcagccaccatggcgtcacgcatagggttgcgcatgcagctcatgcgggagcaggcgcagcaggaggagcagcgggagcgcatgcagcaacaggctgtcatgcattacatgcagcagcagcagcagcagcaacagcagcagctcggagggccgcccaccccggccatcaatacccccgtccacttccagtcgccaccacctgtgcctggggaggtgttgaaggtgcagtcctacctggagaatcccacatcctaccatctgcagcagtcgcagcatcagaaggtgcgggagtacctgtccgagacctatgggaacaagtttgctgctgcccacatcagcccagcccaggctctccgaaacccccaccagccgcctccccaggggtgcgagctggacacgtgctgtcctcctccgctggcaacagtgctcccaataagccccatggccatgctgcacattggctccaaccctgagagggagttggatgatgtcattgacaacattatgcgtctgacgatgtctcttggctacatcaatcctgaaatgcagatgcccaacacgctacccctgtccagcagccacctgaatgtgtacagcagcgacccccaggtcacagcctccctggtgggcgtcaccagcagctcctgccctgcggacctgacccagaagcgagagctcacagatgctgagagcagggccctggccaaggagcggcagaagaaagacaatcacaacttaattgaaaggagacgaaggttcaacatcaatgaccgcatcaaggagttgggaatgctgatccccaaggccaatgacctggacgtgcgctggaacaagggcaccatcctcaaggcctctgtggattacatccggaggatgcagaaggacctgcaaaagtccagggagctggagaaccactctcgccgcctggagatgaccaacaagcagctctggctccgtatccaggagctggagatgcaggctcgagtgcacggcctccctaccacctccccgtccggcatgaacatggctgagctggcccagcaggtggtgaagcaggagctgcctagcgaagagggcccaggggaggccctgatgctgggggctgaggtccctgaccctgagccactgccagctctgcccccgcaagccccgctgcccctgcccacccagccaccgtccccattccatcacctggacttcagccacagcctgagctttgggggcagggaggacgagggtcccccgggctaccccga

SEQ ID NO: 28939 - DNA, 792 bp, Homo Sapiens
tatgtcttccaggtgaacgctatggctccaagaagagcatggtcattctgaccagcagtgtgacggccggcaccgcggaggagttcacctatatcatgaagaggctgggccgggccctggtcattggggaggtgaccagtgggggctgccagccaccacagacctaccacgtggatgacaccaacctctacctcactatccccacggcccgttctgtgggggcctcggatggcagctcctgggaaggggtgggggtgacaccccatgtggttgtccctgcagaagaggctctcgccagggccaaggagatgctccagcacaaccagctgagggtgaagcggagcccaggcctgcaggaccacctgtagggaagggccccataggcagagccccagggcagacagaacctctgggacacacaccaagggcactcctgcaggtggcccggcctgaggttcccaggagcagcaaaggggcctgctgagctctggttaggttacagctggaggtgtgtatatatacacacacacacgtgtatatacacatatatatgtgtatgtatatatatgtatatatatatggctttccaataaccacctaaattttaacaaaggttccttctaagtggtagaacttggggtggtatttttaccttccttcttcatactttgctctttttcttaaatactcattaatgtgcatatatcattattttcagatgcagctatcattattccaaaatacaaaataaagaagataaaataaattatatacccgagccattaaccacaa

SEQ ID NO: 28940 - DNA, 1341 bp, Homo Sapiens
gaattccggcgaccgtgtgggatgaggccgagcaagatggaattggggaggaggtgctcaagatgtccacggaggagatcatccagcgcacacggctgctggacagtgagatcaagatcatgaagagtgaagtgttgagagtcacccatgagctccaagccatgaaggacaagataaaagagaacagtgagaaaatcaaagtgaacaagaccctgccgtaccttgtctccaacgtcatcgagctcctggatgttgatcctaatgaccaagaggaggatggtgccaatattgacctggactcccagaggaagggcaagtgtgctgtgatcaaaacctctacacgacagacgtacttccttcctgtgattgggttggtggatgctgaaaagctaaagccaggagacctggtgggtgtgaacaaagactcctatctgatcctggagacgctgcccacagagtatgactcgcgggtgaaggccatggaggtagacgagaggcccacggagcaatacagtgacattgggggtttggacaagcagatccaggagctggtggaggccattgtcttgccaatgaaccacaaggagaagtttgagaacttggggatccaacctccaaaaggggtgctgatgtatgggcccccagggacggggaagaccctcctggcccgggcctgtgccgcacagactaaggccaccttcctaaagctggctggcccccagctggtgcagatgttcattggagatggtgccaagctagtccgggatgcctttgccctggccaaggagaaagcgccctctatcatcttcattgatgagttggatgccatcggcaccaagcgctttgacagtgagaaggctggggaccgggaggtgcagaggacaatgctggagcttctgaaccagctggatggcttccagcccaacacccaagttaaggtaattgcagccacaaacagggtggacatcctggaccccgccctcctccgctcgggccgccttgaccgcaagatagagttcccgatgcccaatgaggaggcccgggccagaatcatgcagatccactcccgaaagatgaatgtcagtcctgacgtgaactacgaggagctggcccgctgcacagatgacttcaatggggcccagtgcaaggctgtgtgtgtggaggcgggcatgatcgcactggccaggggtgccacggagctcacccacgaggactacatggaaggcatcctggaggtgcaggccaagaagaaagccaacctacaatactacgcctaggcacacaggccagccccagtctcacggctgaagtgcgcaataaaagatggtttagggggaattc

SEQ ID NO: 28941 - DNA, 3441 bp, Homo Sapiens
gcctgtaggagctgtccaggccatctccaaccatgggagtgaggcacccgccctgctcccaccggctcctggccgtctgcgccctcgtgtccttggcaaccgctgcactcctggggcacatcctactccatgatttcctgctggttccccgagagctgagtggctcctccccagtcctggaggagactcacccagctcaccagcagggagccagcagaccagggccccgggatgcccaggcacaccccggccgtcccagagcagtgcccacacagtgcgacgtcccccccaacagccgcttcgattgcgcccctgacaaggccatcacccaggaacagtgcgaggcccgcggctgctgctacatccctgcaaagcaggggctgcagggagcccagatggggcagccctggtgcttcttcccacccagctaccccagctacaagctggagaacctgagctcctctgaaatgggctacacggccaccctgacccgtaccacccccaccttcttccccaaggacatcctgaccctgcggctggacgtgatgatggagactgagaaccgcctccacttcacgatcaaagatccagctaacaggcgctacgaggtgcccttggagaccccgcatgtccacagccgggcaccgtccccactctacagcgtggagttctccgaggagcccttcggggtgatcgtgcgccggcagctggacggccgcgtgctgctgaacacgacggtggcgcccctgttctttgcggaccagttccttcagctgtccacctcgctgccctcgcagtatatcacaggcctcgccgagcacctcagtcccctgatgctcagcaccagctggaccaggatcaccctgtggaaccgggaccttgcgcccacgcccggtgcgaacctctacgggtctcaccctttctacctggcgctggaggacggcgggtcggcacacggggtgttcctgctaaacagcaatgccatggatgtggtcctgcagccgagccctgcccttagctggaggtcgacaggtgggatcctggatgtctacatcttcctgggcccagagcccaagagcgtggtgcagcagtacctggacgttgtgggatacccgttcatgccgccatactggggcctgggcttccacctgtgccgctggggctactcctccaccgctatcacccgccaggtggtggagaacatgaccagggcccacttccccctggacgtccagtggaacgacctggactacatggactcccggagggacttcacgttcaacaaggatggcttccgggacttcccggccatggtgcaggagctgcaccagggcggccggcgctacatgatgatcgtggatcctgccatcagcagctcgggccctgccgggagctacaggccctacgacgagggtctgcggaggggggttttcatcaccaacgagaccggccagccgctgattgggaaggtatggcccgggtccactgccttccccgacttcaccaaccccacagccctggcctggtgggaggacatggtggctgagttccatgaccaggtgcccttcgacggcatgtggattgacatgaacgagccttccaacttcatcaggggctctgaggacggctgccccaacaatgagctggagaacccaccctacgtgcctggggtggttggggggaccctccaggcggccaccatctgtgcctccagccaccagtttctctccacacactacaacctgcacaacctctacggcctgaccgaagccatcgcctcccacagggcgctggtgaaggctcgggggacacgcccatttgtgatctcccgctcgacctttgctggccacggccgatacgccggccactggacgggggacgtgtggagctcctgggagcagctcgcctcctccgtgccagaaatcctgcagtttaacctgctgggggtgcctctggtcggggccgacgtctgcggcttcctgggcaacacctcagaggagctgtgtgtgcgctggacccagctgggggccttctaccccttcatgcggaaccacaacagcctgctcagtctgccccaggagccgtacagcttcagcgagccggcccagcaggccatgaggaaggccctcaccctgcgctacgcactcctcccccacctctacacactgttccaccaggcccacgtcgcgggggagaccgtggcccggcccctcttcctggagttccccaaggactctagcacctggactgtggaccaccagctcctgtggggggaggccctgctcatcaccccagtgctccaggccgggaaggccgaagtgactggctacttccccttgggcacatggtacgacctgcagacggtgccaatagaggcccttggcagcctcccacccccacctgcagctccccgtgagccagccatccacagcgaggggcagtgggtgacgctgccggcccccctggacaccatcaacgtccacctccgggctgggtacatcatccccctgcagggccctggcctcacaaccacagagtcccgccagcagcccatggccctggctgtggccctgaccaagggtggggaggcccgaggggagctgttctgggacgatggagagagcctggaagtgctggagcgaggggcctacacacaggtcatcttcctggccaggaataacacgatcgtgaatgagctggtacgtgtgaccagtgagggagctggcctgcagctgcagaaggtgactgtcctgggcgtggccacggcgccccagcaggtcctctccaacggtgtccctgtctccaacttcacctacagccccgacaccaaggtcctggacatctgtgtctcgctgttgatgggagagcagtttctcgtcagctggtgttagccgggcggagtgtgttagtctctccagagggaggctggttccccagggaagcagagcctgtgtgcgggcagcagctgtgtgcgggcctgggggttgcatgtgtcacctggagctgggcactaaccattccaagccgccgcatcgcttgtttccacctcctgggccggggctctggcccccaacgtgtctaggagagctttctccctagatcgcactgtgggccggggcctggagggctgctctgtgttaataagattgtaaggtttgccctcctcacctgttgccggcatgcgggtagtattagccacccccctccatctgttcccagcaccggagaagggggtgctcaggtggaggtgtggggtatgcacctgagctcctgcttcgcgcctgctgctctgccccaacgcgaccgctgcccggctgcccagagggctggatgcctgccggtccccgagcaagcctgggaactcaggaaaattcacaggacttgggagattctaaatcttaagtgcaattatttttaataaaaggggcatttggaatcaaa

SEQ ID NO: 28942 - DNA, 4487 bp, Homo Sapiens
ccgcgggaggcggacgagatgcgagcgcggccgcggccccggccgctctgggtgactgtgctggcgctgggggcgctggcgggcgttggcgtaggagggcccaacatctgtaccacgcgaggtgtgagctcctgccagcagtgcctggctgtgagccccatgtgtgcctggtgctctgatgaggccctgcctctgggctcacctcgctgtgacctgaaggagaatctgctgaaggataactgtgccccagaatccatcgagttcccagtgagtgaggcccgagtactagaggacaggcccctcagcgacaagggctctggagacagctcccaggtcactcaagtcagtccccagaggattgcactccggctccggccagatgattcgaagaatttctccatccaagtgcggcaggtggaggattaccctgtggacatctactacttgatggacctgtcttactccatgaaggatgatctgtggagcatccagaacctgggtaccaagctggccacccagatgcgaaagctcaccagtaacctgcggattggcttcggggcatttgtggacaagcctgtgtcaccatacatgtatatctccccaccagaggccctcgaaaacccctgctatgatatgaagaccacctgcttgcccatgtttggctacaaacacgtgctgacgctaactgaccaggtgacccgcttcaatgaggaagtgaagaagcagagtgtgtcacggaaccgagatgccccagagggtggctttgatgccatcatgcaggctacagtctgtgatgaaaagattggctggaggaatgatgcatcccacttgctggtgtttaccactgatgccaagactcatatagcattggacggaaggctggcaggcattgtccagcctaatgacgggcagtgtcatgttggtagtgacaatcattactctgcctccactaccatggattatccctctttggggctgatgactgagaagctatcccagaaaaacatcaatttgatctttgcagtgactgaaaatgtagtcaatctctatcagaactatagtgagctcatcccagggaccacagttggggttctgtccatggattccagcaatgtcctccagctcattgttgatgcttatgggaaaatccgttctaaagtcgagctggaagtgcgtgacctccctgaagagttgtctctatccttcaatgccacctgcctcaacaatgaggtcatccctggcctcaagtcttgtatgggactcaagattggagacacggtgagcttcagcattgaggccaaggtgcgaggctgtccccaggagaaggagaagtcctttaccataaagcccgtgggcttcaaggacagcctgatcgtccaggtcacctttgattgtgactgtgcctgccaggcccaagctgaacctaatagccatcgctgcaacaatggcaatgggacctttgagtgtggggtatgccgttgtgggcctggctggctgggatcccagtgtgagtgctcagaggaggactatcgcccttcccagcaggacgagtgcagcccccgggagggtcagcccgtctgcagccagcggggcgagtgcctctgtggtcaatgtgtctgccacagcagtgactttggcaagatcacgggcaagtactgcgagtgtgacgacttctcctgtgtccgctacaagggggagatgtgctcaggccatggccagtgcagctgtggggactgcctgtgtgactccgactggaccggctactactgcaactgtaccacgcgtactgacacctgcatgtccagcaatgggctgctgtgcagcggccgcggcaagtgtgaatgtggcagctgtgtctgtatccagccgggctcctatggggacacctgtgagaagtgccccacctgcccagatgcctgcacctttaagaaagaatgtgtggagtgtaagaagtttgaccggggagccctacatgacgaaaatacctgcaaccgttactgccgtgacgagattgagtcagtgaaagagcttaaggacactggcaaggatgcagtgaattgtacctataagaatgaggatgactgtgtcgtcagattccagtactatgaagattctagtggaaagtccatcctgtatgtggtagaagagccagagtgtcccaagggccctgacatcctggtggtcctgctctcagtgatgggggccattctgctcattggccttgccgccctgctcatctggaaactcctcatcaccatccacgaccgaaaagaattcgctaaatttgaggaagaacgcgccagagcaaaatgggacacagccaacaacccactgtataaagaggccacgtctaccttcaccaatatcacgtaccggggcacttaatgataagcagtcatcctcagatcattatcagcctgtgccaggattgcaggagtccctgccatcatgtttacagaggacagtatttgtggggagggatttcggggctcagagtggggtaggttgggagaatgtcagtatgtggaagtgtgggtctgtgtgtgtgtatgtgggggtctgtgtgtttatgtgtgtgtgttgtgtgtgggagtgtgtaatttaaaattgtgatgtgtcctgataagctgagctccttagcctttgtcccagaatgcctcctgcagggattcttcctgcttagcttgagggtgactatggagctgagcaggtgttcttcattacctcagtgagaagccagctttcctcatcaggccattgtccctgaagagaagggcagggctgaggcctctcattccagaggaagggacaccaagccttggctctaccctgagttcataaatttatggttctcaggcctgactctcagcagctatggtaggaactgctggcttggcagcccgggtcatctgtacctctgcctcctttcccctccctcaggccgaaggaggagtcagggagagctgaactattagagctgcctgtgccttttgccatcccctcaacccagctatggttctctcgcaagggaagtccttgcaagctaattctttgacctgttgggagtgaggatgtctgggccactcaggggtcattcatggcctgggggatgtaccagcatctcccagttcataatcacaacccttcaaagatttgccttattggcagctctactctggaggtttgtttagaagaagtgtgtcacccttaggccagcaccatctctttacctcctaattccacaccctcactgctgtagacatttgctatgacctggggatgtctctcatgaccaaatgcttttcctcaaagggagagagtgctattgtagagccagaggtctggccctatgcttccggcctcctgtccctcatccatagcacctccacatacctggccctgagccttggtgtgctgtatccatccatggggctgattgtatttaccttctacctcttggctgccttgtgaaggaattattcccatgagttggctgggaataagtgccaggatggaatgatgggtcagttgtatcagcacgtgtggcctgttcttctatgggttacaacctcatttaactcagtctttaatctgagaggccacagtgcaattttattttatttttctcatgatgaggttttcttaacttaaaagaacatgtatataaacatgcttgcattatatttgtaaatttatgtgtatggcaaagaaggagagcataggaaaccacacagacttgggcagggtacagacactcccacttggcatcattcacagcaagtcactggccagtggctggatctgtgaggggctctctcatgatagaaggctatggggatagatgtgtggacacattggacctttcctgaggaagagggactgttcttttgtcccagaaaagcagtggctccattggtgttgacatacatccaacattaaaagccacccccaaatgcccaagaaaaaaagaaagacttatcaacatttgttccatgagcagaaaactggagctctggcctcagtgttacagctaaataatctttaattaaggcaagtcactttcttcttcttaaagctgtttctagtttgagaaatgatgggattttagcagccagtcttgaaggtctctttcagtatcaacattctaagatgctgggacttactgtgtcatcaaatgtgcggttaagattctctgggatattgatactgtttgtgtttttagttgggagatctgagagacctggctttggcaagagcagatgtcattccatatcacctttctcaatgaaagtctcattctatcctctctccaaacccgttttccaacatttgttaatagttacgtctctcctgatgtagcacttaagcttcatttagttattatttctttcttcactttgcacacatttgcatccacatattagggaaggaataagtagctgcaaactatctattcctgtattattgtgttaacattgagataaacc

SEQ ID NO: 28943 - DNA, 1598 bp, Homo Sapiens
cggggggtctgtacgacgtgcaggctttcaagtttggggacttcgtgctgaagagcgggctttcctcccccatctacatcgatctgcggggcatcgtgtctcgaccgcgtcttctgagtcaggttgcagatattttattccaaactgcccaaaatgcaggcatcagttttgacaccgtgtgtggagtgccttatacagctttgccattggctacagttatctgttcaaccaatcaaattccaatgcttattagaaggaaagaaacaaaggattatggaactaagcgtcttgtagaaggaactattaatccaggagaaacctgtttaatcattgaagatgttgtcaccagtggatctagtgttttggaaactgttgaggttcttcagaaggagggcttgaaggtcactgatgccatagtgctgttggacagagagcagggaggcaaggacaagttgcaggcgcacgggatccgcctccactcagtgtgtacattgtccaaaatgctggagattctcgagcagcagaaaaaagttgatgctgagacagttgggagagtgaagaggtttattcaggagaatgtctttgtggcagcgaatcataatggttctcccctttctataaaggaagcacccaaagaactcagcttcggtgcacgtgcagagctgcccaggatccacccagttgcatcgaagcttctcaggcttatgcaaaagaaggagaccaatctgtgtctatctgctgatgtttcactggccagagagctgttgcagctagcagatgctttaggacctagtatctgcatgctgaagactcatgtagatattttgaatgattttactctggatgtgatgaaggagttgataactctggcaaaatgccatgagttcttgatatttgaagaccggaagtttgcagatataggaaacacagtgaaaaagcagtatgaaggaggtatctttaaaatagcttcctgggcagatctagtaaatgctcacgtggtgccaggctcaggagttgtgaaaggcctgcaagaagtgggcctgcctttgcatcgggggtgcctccttattgcggaaatgagctccaccggctcccaggccactggggactacactagagcagcggttagaatggctgaggagcactctgaatttgttgttggttttatttctggctcccgagtaagcatgaaaccagaatttcttcacttgactccaggagttcagttggaagcaggaggagataatcttggccaacagtacaatagcccacaagaagttattggcaaacgaggttccgatatcatcattgtaggtcgtggcataatctcagcagctgatcgtctggaagcagcagagatgtacagaaaagctgcttgggaagcgtatttgagtagacttggtgtttgagtgcttcagatacatttttcagatacaatgtgaagacattgaagatatgtggtcctcctgaaagtcactggctggaaataatccaattattcctgcttggattcttccacagggcctgtgtaagaatgggttctggagttctcatggtatttaggaaatattgagtaatttgtaatcaccgccccgccc

SEQ ID NO: 28944 - DNA, 4190 bp, Homo Sapiens
gacttgctgggggaagtcagccagctgcaggccttcctgcaggatctggatgacttccaggcctggctctccatcacccagaaggctgtggcctctgaggacatgcccgaatccctcccagaggctgagcagctcctgcagcagcatgcaggtatcaaggatgagattgacgggcaccaagacagctaccagcgtgttaaggagtctggggagaaagtgatccaaggccagacggacccagagtatctgcttctgggccagcggctggagggcctggatactggctgggatgccctgggcaggatgtgggagagccgcagccacaccctcgctcagtgccttggcttccaggagttccagaaagatgccaagcaggctgaagccatcctcagcaaccaggaatacactctggctcacttggagcccccagactccctggaagctgcagaggctgggatccggaagtttgaggatttcttggggtctatggagaacaaccgggataaggtcttgagtcctgtggactctggaaacaagctggtagctgagggaaacctatactcagacaagatcaaggagaaggtgcagctgattgaggacaggcacaggaagaacaacgagaaggcccaggaggcctctgtcctactgagagacaacctggagctacagaacttcctccagaactgccaggagctcactctctggatcaacgacaagctgctgacatctcaggatgtctcctatgatgaagcacgaaaccttcacaataaatggctaaagcaccaggcgtttgtggcagagctggcttcccatgaagggtggctagagaacatcgatgcggaaggaaagcagctgatggatgagaagccccagtttacagccctggtgtcccaaaagctggaagccctgcaccggctctgggacgagctgcaggccaccacaaaggagaagacccagcacctctcggctgccaggagctccgacctgcgcttgcagacccatgctgacctcaacaagtggatcagcgccatggaggaccagctgcgatcagacgacccgggcaaggacctgaccagtgtcaatcggatgttggctaagctgaagcgagtggaggaccaagtgaatgtgcggaaagaggagctgggggagctgtttgcccaggtgccttcaatgggagaggagggaggagatgcagacttgagcatcgagaagcggttcctggacctcctggaacccctaggaaggaggaagaagcagctggaatcatccagagccaagctgcagatcagccgggacttagaggatgagacgctttgggtggaggagaggctgcctctggcccagtcagccgactatggcactaatctgcaaactgtgcaactgttcatgaagaagaaccagacactgcagaatgagattctgggccatacgccgcgggttgaggatgtgctgcagagagggcagcagctggtggaggcggcggagatcgactgccaggaccttgaggagcgcctggggcacctgcagagctcctgggacaggctgcgggaggcagcggccgggaggctgcagcgactgagggacgccaatgaggcacagcagtactacctggatgcggacgaggctgaggcctggattggcgagcaggagctctatgtcatctccgatgagatccccaaggatgaagagggcgccatcgtgatgctgaagcgacatttgcggcagcagcgtgcggtggaggactacggccggaacatcaagcagctggccagccgggcccagggcctgctgtctgcaggccaccctgagggggaacagatcatcagacttcaggggcaagtggacaagcactacgcagggctgaaggacgtggcggaagagcgcaagcgcaagctggagaacatgtaccacctgttccagctcaagcgggagaccgacgacctggagcagtggatttcagaaaaggagctagtggcctcttccccggaaatggggcaagactttgaccacgtgactcttctgcgggacaagttccgggactttgcccgggagaccggggcgattgggcaggagcgggtggacaatgtgaatgccttcatcgagcgactcatcgacgcgggccacagcgaggcggccaccatcgccgagtggaaggacgggctgaacgagatgtgggcagacctcctggagctcattgacacgcgcatgcagctgctggccgcctcctatgacctgcaccgctacttctacacgggtgccgagatcctgggcctcatcgacgagaagcaccgcgagctgcccgaggacgtggggctggacgccagcacggccgagtccttccaccgggtgcacacagccttcgagcgggacgttcacctgctgggtgtccaggtgcagcagttccaggacgtggccacccgtctgcagacagcatatgctggggagaaggcagaggccatccagaacaaggagcaggaggtgtctgccgcgtggcaggcgctgctcgatgcctgtgccgggcgccggacccagctagtggacacggcggataaattccgcttcttcagcatggcccgtgacctcctctcctggatggagagcatcatccggcagatcgagacccaggagaggcccagggatgtctcctctgtggaactgctcatgaagtatcaccagggcatcaatgcagagattgaaacccggagcaagaacttcagtgcctgcctggagcttggcgagtccctgctgcagcggcagcaccaggcctcagaggagatccgcgagaaactgcagcaggtgatgtccaggaggaaagagatgaatgagaagtgggaagcccgctgggagcggctccgcatgttgctggaggtgtgccagttctcgagggatgcctctgtggctgaggcgtggctgattgcccaggagccctacctggccagcggggactttggacacacagtggacagtgtggagaagctcatcaagaggcatgaggcttttgagaagtccacggccagctgggcagagcgctttgctgccctggagaagcccaccacgcttgagctgaaagaacgccagattgcagagagacccgcagaggagactgggcctcaagaggaggaaggcgagacagcaggggaggctccagtttcccaccatgcggccaccgagagaacgtccccgggggaagaagagggaacgtggcctcagaacctgcagcagccaccaccgccgggtcagcacaaggatgggcagaaatccactggggatgagaggcccaccacggagcccctctttaaggtcctagatacgcctctgagcgagggtgatgagcccgcaacgctgccggccccgcgggaccatgggcagagtgtgcagatggaaggctacctgggccgcaagcatgacctggaggggcccaacaagaaggcttccaacaggtcctggaacaacctgtactgtgtgctcaggaacagtgagctaaccttctacaaggatgccaagaacctggccctggggatgccctaccatggggaggaacccctggccctgagacatgccatctgtgagattgctgccaactacaagaagaagaagcacgtctttaagctgaggctgagtaatggcagcgagtggctcttccatggcaaggatgaggaggagatgctgtcctggctgcagggcgtgagcaccgccatcaacgagtcccagagcatccgcgtcaaggcgcagagcctgcccctgccttccctctccggccccgacgccagcctcggcaagaaagacaaggagaagagattcagcttcttccccaaaaagaagtagcaggtggggctggcgggcgcggcggagtcgggacgcgcagagaccgggcagcccaggccttggcctcctctcgccgccgcccgccggtcgaatcgagatgagtcgagtcgcgggccgggcccccgggccccacgctgcactgcaaaagctgccttcgcccgcgtgtcctgggccgacgccccctccatgccctcgcccgcgctggctccgctccagggacaggggctcccagctcctctggcgcctttggggcctccaggcctgggggcaggaaacggttctctgaggcacacgccctcctctcccaccctcctcctgagccgagggggcacaggccccttacccccaaccaaaaaaaaaaaaaa

SEQ ID NO: 28945 - DNA, 7736 bp, Homo Sapiens
aattgggaagataactctgtcattttcctacttgttcagtccatggtggttgatcttaagaacctgctttttaatccaagtaagccattctcaagaggcagtcagcctgcagatgtggatctaatgattgactgccttgtttcttgctttcgtataagccctcacaacaaccaacactttaagatctgcctggctcagaattcaccttctacatttcactatgtgctggtaaattcactccatcgaatcatcaccaattccgcattggattggtggcctaagattgatgctgtgtattgtcactcggttgaacttcgaaatatgtttggtgaaacacttcataaagcagtgcaaggttgtggagcacacccagcaatacgaatggccccgagtcttacatttaaagaaaaagtaacaagccttaaatttaaagaaaaacctacagacctggagacaagaagctataagtatcttctcttgtccatagtgaaactaattcatgcagatccaaagctcttgctttgtaatccaagaaaacaggggcccgaaacccaaggcagtacagcagaattaattacagggctcgtccaactggtccctcagtcacacatgccagagattgctcaggaagcaatggaggctctgctggttcttcatcagttagatagcattgatttgtggaatcctgatgctcctgtagaaacattttgggagattagctcacaaatgcttttttacatctgcaagaaattaactagtcatcaaatgcttagtagcacagaaattctcaagtggttgcgggaaatattgatctgcaggaataaatttcttcttaaaaataagcaggcagatagaagttcctgtcactttctccttttttacggggtaggatgtgatattccttctagtggaaataccagtcaaatgtccatggatcatgaagaattactacgtactcctggagcctctctccggaagggaaaagggaactcctctatggatagtgcagcaggatgcagcggaacccccccratttgccgacaagcccagaccaaactagaagtggccctgtacatgtttctgtggaaccctgacactgaagctgttctggttgccatgtcctgtttccgccacctctgtgaggaagcagatatccggtgtggggtggatgaagtgtcagtgcataacctcttgcccaactataacacattcatggagtttgcctctgtcagcaatatgatgtcaacaggaagagcagcacttcagaaaagagtgatggcactgctgaggcgcattgagcatcccactgcaggaaacactgaggcttgggaagatacacatgcaaaatgggaacaagcaacaaagctaatccttaactatccaaaagccaaaatggaagatggccaggctgctgaaagccttcacaagaccattgttaagaggcgaatgtcccatgtgagtggaggaggatccatagatttgtctgacacagactccctacaggaatggatcaacatgactggcttcctttgtgcccttggaggagtgtgcctccagcagagaagcaattctggcctggcaacctatagcccacccatgggtccagtcagtgaacgtaagggttctatgatttcagtgatgtcttcagagggaaacgcagatacacctgtcagcaaatttatggatcggctgttgtccttaatggtgtgtaaccatgagaaagtgggacttcaaatacggaccaatgttaaggatctggtgggtctagaattgagtcctgctctgtatccaatgctatttaacaaattgaagaataccatcagcaagttttttgactcccaaggacaggttttattgactgataccaatactcaatttgtagaacaaaccatagctataatgaagaacttgctagataatcatactgaaggcagctctgaacatctagggcaagctagcattgaaacaatgatgttaaatctggtcaggtatgttcgtgtgcttgggaatatggtccatgcaattcaaataaaaacgaaactgtgtcaattagttgaagtaatgatggcaaggagagatgacctctcattttgccaagagatgaaatttaggaataagatggtagaatacctgacagactgggttatgggaacatcaaaccaagcagcagatgatgatgtaaaatgtcttacaagagatttggaccaggcaagcatggaagcagtagtttcacttctagctggtctccctctgcagcctgaagaaggagatggtgtggaattgatggaagccaaatcacagttatttcttaaatacttcacattatttatgaaccttttgaatgactgcagtgaagttgaagatgaaagtgcgcaaacaggtggcaggaaacgtggcatgtctcggaggctggcatcactgaggcactgtacggtccttgcaatgtcaaacttactcaatgccaacgtagacagtggtctcatgcactccataggcttaggttaccacaaggatctccagacaagagctacatttatggaagttctcacaaaaatccttcaacaaggcacagaatttgacacacttgcagaaacagtattggctgatcggtttgagagattggtggaactggtcacaatgatgggtgatcaaggagaactccctatagcgatggctctggccaatgtggttccttgttctcagtgggatgaactagctcgagttctggttactctgtttgattctcggcatttactctaccaactgctctggaacatgttttctaaagaagtagaattggcagactccatgcagactctcttccgaggcaacagcttggccagtaaaataatgacattctgtttcaaggtatatggtgctacctatctacaaaaactcctggatcctttattacgaattgtgatcacatcctctgattggcaacatgttagctttgaagtggatcctaccaggttagaaccatcagagagccttgaggaaaaccagcggaacctccttcagatgactgaaaagttcttccatgccatcatcagttcctcctcagaattcccccctcaacttcgaagtgtgtgccactgtttataccaggtggttagccagcgtttccctcagaacagcatcggtgcagtaggaagtgccatgttcctcagatttatcaatcctgccattgtctcaccgtatgaagcagggattttagataaaaagccaccacctagaatcgaaaggggcttgaagttaatgtcaaagatacttcagagtattgccaatcatgttctcttcacaaaagaagaacatatgcggcctttcaatgattttgtgaaaagcaactttgatgcagcacgcaggtttttccttgatatagcatctgattgtcctacaagtgatgcagtaaatcatagtctttccttcataagtgacggcaatgtgcttgctttacatcgtctactctggaacaatcaggagaaaattgggcagtatctttccagcaacagggatcataaagctgttggaagacgaccttttgataagatggcaacacttcttgcatacctgggtcctccagagcacaaacctgtggcagatacacactggtccagccttaaccttaccagttcaaagtttgaggaatttatgactaggcatcatcaggtacatgaaaaagaagaattcaaggctttgaaaacgttaagtattttctaccaagctgggacttccaaagctgggaatcctattttttattatgttgcacggaggttcaaaactggtcaaatcaatggtgatttgctgatataccatgtcttactgactttaaagccatattatgcaaagccatatgaaattgtagtggaccttacccataccgggcctagcaatcgctttaaaacagactttctctctaagtggtttgttgtttttcctggctttgcttacgacaacgtctccgcagtctatatctataactgtaactcctgggtcagggagtacaccaagtatcatgagcggctgctgactggcctcaaaggtagcaaaaggcttgttttcatagactgtcctgggaaactggctgagcacatagagcatgaacaacagaaactacctgctgccaccttggctttagaagaggacctgaaggtattccacaatgctctcaagctagctcacaaagacaccaaagtttctattaaagttggttctactgctgtccaagtaacttcagcagagcgaacaaaagtcctagggcaatcagtctttctaaatgacatttattatgcttcggaaattgaagaaatctgcctagtagatgagaaccagttcaccttaaccattgcaaaccagggcacgccgctcaccttcatgcaccaggagtgtgaagccattgtccagtctatcattcatatccggacccgctgggaactgtcacagcccgactctatcccccaacacaccaagattcggccaaaagatgtccctgggacactgctcaatatcgcattacttaatttaggcagttctgacccgagtttacggtcagctgcctataatcttctgtgtgccttaacttgtacctttaatttaaaaatcgagggccagttactagagacatcaggtttatgtatccctgccaacaacaccctctttattgtctctattagtaagacactggcagccaatgagccacacctcacgttagaatttttggaagagtgtatttctggatttagcaaatctagtattgaattgaaacacctttgtttggaatacatgactccatggctgtcaaatctagttcgtttttgcaagcataatgatgatgccaaacgacaaagagttactgctattcttgacaagctgataacaatgaccatcaatgaaaaacagatgtacccatctattcaagcaaaaatatggggaagccttgggcagattacagatctgcttgatgttgtactagacagtttcatcaaaaccagtgcaacaggtggcttgggatcaataaaagctgaggtgatggcagatactgctgtagctttggcttctggaaatgtgaaattggtttcaagcaaggttattggaaggatgtgcaaaataattgacaagacatgcttatctccaactcctactttagaacaacatcttatgtgggatgatattgctattttagcacgctacatgctgatgctgtccttcaacaattcccttgatgtggcagctcatcttccctacctcttccacgttgttactttcttagtagccacaggtccgctctcccttagagcttccacacatggactggtcattaatatcattcactctctgtgtacttgttcacagcttcattttagtgaagagaccaagcaagttttgagactcagtctgacagagttctcattacccaaattttacttgctgtttggcattagcaaagtcaagtcagctgctgtcattgccttccgttccagttaccgggacaggtcattctctcctggctcctatgagagagagacttttgctttgacatccttggaaacagtcacagaagctttgttggagatcatggaggcatgcatgagagatattccaacgtgcaagtggctggaccagtggacagaactagctcaaagatttgcattccaatataatccatccctgcaaccaagagctcttgttgtctttgggtgtattagcaaacgagtgtctcatgggcagataaagcagataatccgtattcttagcaaggcacttgagagttgcttaaaaggacctgacacttacaacagtcaagttctgatagaagctacagtaatagcactaaccaaattacagccacttcttaataaggactcgcctctgcacaaagccctcttttgggtagctgtggctgtgctgcagcttgatgaggtcaacttgtattcagcaggtaccgcacttcttgaacaaaacctgcatactttagatagtctccgtatattcaatgacaagagtccagaggaagtatttatggcaatccggaatcctctggagtggcactgcaagcaaatggatcattttgttggactcaatttcaactctaactttaactttgcattggttggacaccttttaaaagggtacaggcatccttcacctgctattgttgcaagaacagtcagaattttacatacactactaactctggttaacaaacacagaaattgtgacaaatttgaagtgaatacacagagcgtggcctacttagcagctttacttacagtgtctgaagaagttcgaagtcgctgcagcctaaaacatagaaagtcacttcttcttactgatatttcaatggaaaatgttcctatggatacatatcccattcatcatggtgacccttcctataggacactaaaggagactcagccatggtcctctcccaaaggttctgaaggataccttgcagccacctatccaactgtcggccagaccagtccccgagccaggaaatccatgagcctggacatggggcaaccttctcaggccaacactaagaagttgcttggaacaaggaaaagttttgatcacttgatatcagacacaaaggctcctaaaaggcaagaaatggaatcagggatcacaacaccccccaaaatgaggagagtagcagaaactgattatgaaatggaaactcagaggatttcctcatcacaacagcacccacatttacgtaaagtttcagtgtctgaatcaaatgttctcttggatgaagaagtacttactgatccgaagatccaggcgctgcttcttactgttctagctacactggtaaaatataccacagatgagtttgatcaacgaattctttatgaatacttagcagaggccagtgttgtgtttcccaaagtctttcctgttgtgcataatttgttggactctaagatcaacaccctgttatcattgtgccaagatccaaatttgttaaatccaatccatggaattgtgcagagtgtggtgtaccatgaagaatccccaccacaataccaaacatcttacctgcaaagttttggttttaatggcttgtggcggtttgcaggaccgttttcaaagcaaacacaaattccagactatgctgagcttattgttaagtttcttgatgccttgattgacacgtacctgcctggaattgatgaagaaaccagtgaagaatccctcctgactcccacatctccttaccctcctgcactgcagagccagcttagtatcactgccaaccttaacctttctaattccatgacctcacttgcaacttcccagcattccccaggaatcgacaaggagaacgttgaactctcccctaccactggccactgtaacagtggacgaactcgccacggatccgcaagccaagtgcagaagcaaagaagcgctggcagtttcaaacgtaatagcattaagaagatcgtgtgaagcttgcttgctttcttttttaaaatcaacttaacatgggctcttcactagtgaccccttccctgtccttgccctttccccccatgttgtaatgctgcacttcctgttttataatgaacccatccggtttgccatgttgccagatgatcaactcttcgaagccttgcctaaatttaatgctgccttttctttaactttttttcttctacttttggcgtgtatctggtatatgtaagtgttcagaacaactgcaaagaaagtgggaggtcaggaaactt

SEQ ID NO: 28946 - DNA, 7790 bp, Homo Sapiens
aattgggaagataactctgtcattttcctacttgttcagtccatggtggttgatcttaagaacctgctttttaatccaagtaagccattctcaagaggcagtcagcctgcagatgtggatctaatgattgactgccttgtttcttgctttcgtataagccctcacaacaaccaacactttaagatctgcctggctcagaattcaccttctacatttcactatgtgctggtaaattcactccatcgaatcatcaccaattccgcattggattggtggcctaagattgatgctgtgtattgtcactcggttgaacttcgaaatatgtttggtgaaacacttcataaagcagtgcaaggttgtggagcacacccagcaatacgaatggccccgagtcttacatttaaagaaaaagtaacaagccttaaatttaaagaaaaacctacagacctggagacaagaagctataagtatcttctcttgtccatagtgaaactaattcatgcagatccaaagctcttgctttgtaatccaagaaaacaggggcccgaaacccaaggcagtacagcagaattaattacagggctcgtccaactggtccctcagtcacacatgccagagattgctcaggaagcaatggaggctctgctggttcttcatcagttagatagcattgatttgtggaatcctgatgctcctgtagaaacattttgggagattagctcacaaatgcttttttacatctgcaagaaattaactagtcatcaaatgcttagtagcacagaaattctcaagtggttgcgggaaatattgatctgcaggaataaatttcttcttaaaaataagcaggcagatagaagttcctgtcactttctccttttttacggggtaggatgtgatattccttctagtggaaataccagtcaaatgtccatggatcatgaagaattactacgtactcctggagcctctctccggaagggaaaagggaactcctctatggatagtgcagcaggatgcagcggaacccccccratttgccgacaagcccagaccaaactagaagtggccctgtacatgtttctgtggaaccctgacactgaagctgttctggttgccatgtcctgtttccgccacctctgtgaggaagcagatatccggtgtggggtggatgaagtgtcagtgcataacctcttgcccaactataacacattcatggagtttgcctctgtcagcaatatgatgtcaacaggaagagcagcacttcagaaaagagtgatggcactgctgaggcgcattgagcatcccactgcaggaaacactgaggcttgggaagatacacatgcaaaatgggaacaagcaacaaagctaatccttaactatccaaaagccaaaatggaagatggccaggctgctgaaagccttcacaagaccattgttaagaggcgaatgtcccatgtgagtggaggaggatccatagatttgtctgacacagactccctacaggaatggatcaacatgactggcttcctttgtgcccttggaggagtgtgcctccagcagagaagcaattctggcctggcaacctatagcccacccatgggtccagtcagtgaacgtaagggttctatgatttcagtgatgtcttcagagggaaacgcagatacacctgtcagcaaatttatggatcggctgttgtccttaatggtgtgtaaccatgagaaagtgggacttcaaatacggaccaatgttaaggatctggtgggtctagaattgagtcctgctctgtatccaatgctatttaacaaattgaagaataccatcagcaagttttttgactcccaaggacaggttttattgactgataccaatactcaatttgtagaacaaaccatagctataatgaagaacttgctagataatcatactgaaggcagctctgaacatctagggcaagctagcattgaaacaatgatgttaaatctggtcaggtatgttcgtgtgcttgggaatatggtccatgcaattcaaataaaaacgaaactgtgtcaattagttgaagtaatgatggcaaggagagatgacctctcattttgccaagagatgaaatttaggaataagatggtagaatacctgacagactgggttatgggaacatcaaaccaagcagcagatgatgatgtaaaatgtcttacaagagatttggaccaggcaagcatggaagcagtagtttcacttctagctggtctccctctgcagcctgaagaaggagatggtgtggaattgatggaagccaaatcacagttatttcttaaatacttcacattatttatgaaccttttgaatgactgcagtgaagttgaagatgaaagtgcgcaaacaggtggcaggaaacgtggcatgtctcggaggctggcatcactgaggcactgtacggtccttgcaatgtcaaacttactcaatgccaacgtagacagtggtctcatgcactccataggcttaggttaccacaaggatctccagacaagagctacatttatggaagttctcacaaaaatccttcaacaaggcacagaatttgacacacttgcagaaacagtattggctgatcggtttgagagattggtggaactggtcacaatgatgggtgatcaaggagaactccctatagcgatggctctggccaatgtggttccttgttctcagtgggatgaactagctcgagttctggttactctgtttgattctcggcatttactctaccaactgctctggaacatgttttctaaagaagtagaattggcagactccatgcagactctcttccgaggcaacagcttggccagtaaaataatgacattctgtttcaaggtatatggtgctacctatctacaaaaactcctggatcctttattacgaattgtgatcacatcctctgattggcaacatgttagctttgaagtggatcctaccaggttagaaccatcagagagccttgaggaaaaccagcggaacctccttcagatgactgaaaagttcttccatgccatcatcagttcctcctcagaattcccccctcaacttcgaagtgtgtgccactgtttataccaggtggttagccagcgtttccctcagaacagcatcggtgcagtaggaagtgccatgttcctcagatttatcaatcctgccattgtctcaccgtatgaagcagggattttagataaaaagccaccacctagaatcgaaaggggcttgaagttaatgtcaaagatacttcagagtattgccaatcatgttctcttcacaaaagaagaacatatgcggcctttcaatgattttgtgaaaagcaactttgatgcagcacgcaggtttttccttgatatagcatctgattgtcctacaagtgatgcagtaaatcatagtctttccttcataagtgacggcaatgtgcttgctttacatcgtctactctggaacaatcaggagaaaattgggcagtatctttccagcaacagggatcataaagctgttggaagacgaccttttgataagatggcaacacttcttgcatacctgggtcctccagagcacaaacctgtggcagatacacactggtccagccttaaccttaccagttcaaagtttgaggaatttatgactaggcatcatcaggtacatgaaaaagaagaattcaaggctttgaaaacgttaagtattttctaccaagctgggacttccaaagctgggaatcctattttttattatgttgcacggaggttcaaaactggtcaaatcaatggtgatttgctgatataccatgtcttactgactttaaagccatattatgcaaagccatatgaaattgtagtggaccttacccataccgggcctagcaatcgctttaaaacagactttctctctaagtggtttgttgtttttcctggctttgcttacgacaacgtctccgcagtctatatctataactgtaactcctgggtcagggagtacaccaagtatcatgagcggctgctgactggcctcaaaggtagcaaaaggcttgttttcatagactgtcctgggaaactggctgagcacatagagcatgaacaacagaaactacctgctgccaccttggctttagaagaggacctgaaggtattccacaatgctctcaagctagctcacaaagacaccaaagtttctattaaagttggttctactgctgtccaagtaacttcagcagagcgaacaaaagtcctagggcaatcagtctttctaaatgacatttattatgcttcggaaattgaagaaatctgcctagtagatgagaaccagttcaccttaaccattgcaaaccagggcacgccgctcaccttcatgcaccaggagtgtgaagccattgtccagtctatcattcatatccggacccgctgggaactgtcacagcccgactctatcccccaacacaccaagattcggccaaaagatgtccctgggacactgctcaatatcgcattacttaatttaggcagttctgacccgagtttacggtcagctgcctataatcttctgtgtgccttaacttgtacctttaatttaaaaatcgagggccagttactagagacatcaggtttatgtatccctgccaacaacaccctctttattgtctctattagtaagacactggcagccaatgagccacacctcacgttagaatttttggaagagtgtatttctggatttagcaaatctagtattgaattgaaacacctttgtttggaatacatgactccatggctgtcaaatctagttcgtttttgcaagcataatgatgatgccaaacgacaaagagttactgctattcttgacaagctgataacaatgaccatcaatgaaaaacagatgtacccatctattcaagcaaaaatatggggaagccttgggcagattacagatctgcttgatgttgtactagacagtttcatcaaaaccagtgcaacaggtggcttgggatcaataaaagctgaggtgatggcagatactgctgtagctttggcttctggaaatgtgaaattggtttcaagcaaggttattggaaggatgtgcaaaataattgacaagacatgcttatctccaactcctactttagaacaacatcttatgtgggatgatattgctattttagcacgctacatgctgatgctgtccttcaacaattcccttgatgtggcagctcatcttccctacctcttccacgttgttactttcttagtagccacaggtccgctctcccttagagcttccacacatggactggtcattaatatcattcactctctgtgtacttgttcacagcttcattttagtgaagagaccaagcaagttttgagactcagtctgacagagttctcattacccaaattttacttgctgtttggcattagcaaagtcaagtcagctgctgtcattgccttccgttccagttaccgggacaggtcattctctcctggctcctatgagagagagacttttgctttgacatccttggaaacagtcacagaagctttgttggagatcatggaggcatgcatgagagatattccaacgtgcaagtggctggaccagtggacagaactagctcaaagatttgcattccaatataatccatccctgcaaccaagagctcttgttgtctttgggtgtattagcaaacgagtgtctcatgggcagataaagcagataatccgtattcttagcaaggcacttgagagttgcttaaaaggacctgacacttacaacagtcaagttctgatagaagctacagtaatagcactaaccaaattacagccacttcttaataaggactcgcctctgcacaaagccctcttttgggtagctgtggctgtgctgcagcttgatgaggtcaacttgtattcagcaggtaccgcacttcttgaacaaaacctgcatactttagatagtctccgtatattcaatgacaagagtccagaggaagtatttatggcaatccggaatcctctggagtggcactgcaagcaaatggatcattttgttggactcaatttcaactctaactttaactttgcattggttggacaccttttaaaagggtacaggcatccttcacctgctattgttgcaagaacagtcagaattttacatacactactaactctggttaacaaacacagaaattgtgacaaatttgaagtgaatacacagagcgtggcctacttagcagctttacttacagtgtctgaagaagttcgaagtcgctgcagcctaaaacatagaaagtcacttcttcttactgatatttcaatggaaaatgttcctatggatacatatcccattcatcatggtgacccttcctataggacactaaaggagactcagccatggtcctctcccaaaggttctgaaggataccttgcagccacctatccaactgtcggccagaccagtccccgagccaggaaatccatgagcctggacatggggcaaccttctcaggccaacactaagaagttgcttggaacaaggaaaagttttgatcacttgatatcagacacaaaggctcctaaaaggcaagaaatggaatcagggatcacaacaccccccaaaatgaggagagtagcagaaactgattatgaaatggaaactcagaggatttcctcatcacaacagcacccacatttacgtaaagtttcagtgtctgaatcaaatgttctcttggatgaagaagtacttactgatccgaagatccaggcgctgcttcttactgttctagctacactggtaaaatataccacagatgagtttgatcaacgaattctttatgaatacttagcagaggccagtgttgtgtttcccaaagtctttcctgttgtgcataatttgttggactctaagatcaacaccctgttatcattgtgccaagatccaaatttgttaaatccaatccatggaattgtgcagagtgtggtgtaccatgaagaatccccaccacaataccaaacatcttacctgcaaagttttggttttaatggcttgtggcggtttgcaggaccgttttcaaagcaaacacaaattccagactatgctgagcttattgttaagtttcttgatgccttgattgacacgtacctgcctggaattgatgaagaaaccagtgaagaatccctcctgactcccacatctccttaccctcctgcactgcagagccagcttagtatcactgccaaccttaacctttctaattccatgacctcacttgcaacttcccagcattccccagcttctctgccttgctctaactcagcagttttcatgcagctgttccctcatcaaggaatcgacaaggagaacgttgaactctcccctaccactggccactgtaacagtggacgaactcgccacggatccgcaagccaagtgcagaagcaaagaagcgctggcagtttcaaacgtaatagcattaagaagatcgtgtgaagcttgcttgctttcttttttaaaatcaacttaacatgggctcttcactagtgaccccttccctgtccttgccctttccccccatgttgtaatgctgcacttcctgttttataatgaacccatccggtttgccatgttgccagatgatcaactcttcgaagccttgcctaaatttaatgctgccttttctttaactttttttcttctacttttggcgtgtatctggtatatgtaagtgttcagaacaactgcaaagaaagtgggaggtcaggaaactt

SEQ ID NO: 28947 - DNA, 7790 bp, Homo Sapiens; identical to SEQ ID NO: 28946

SEQ ID NO: 28948 - DNA, 2938 bp, Homo Sapiens
gagagaaaaagtaaaagaccgaagaaggaggctggagagaccaggatccttccagctgaacaaagtcagccacaaagcagactagccagccggctacaattggagtcagagtcccaaagacatgggcttgttagagtgctgtgcaagatgtctggtaggggccccctttgcttccctggtggccactggattgtgtttctttggggtggcactgttctgtggctgtggacatgaagccctcactggcacagaaaagctaattgagacctatttctccaaaaactaccaagactatgagtatctcatcaatgtgatccatgccttccagtatgtcatctatggaactgcctctttcttcttcctttatggggccctcctgctggctgagggcttctacaccaccggcgcagtcaggcagatctttggcgactacaagaccaccatctgcggcaagggcctgagcgcaacggtaacagggggccagaaggggaggggttccagaggccaacatcaagctcattctttggagcgggtgtgtcattgtttgggaaaatggctaggacatcccgacaagtttgtgggcatcacctatgccctgaccgttgtgtggctcctggtgtttgcctgctctgctgtgcccgtgtacatttacttcaacacctggaccacctgcgactctattgccttccccagcaagacctctgccagtataggcagtctctgtgctgacgccagaatgtatggtgttctcccatggattgctttccctggcaaggtttgtggctccaaccttctgtccatctgcaaaacagctgagttccaaatgaccttccacctgtttattgctgcatttgtgggggctgcagctacactggtttccctgctcaccttcatgattgctgccacttacaactttgccgtccttaaactcatgggccgaggcaccaagttctgatcccccgtagaaatccccctttctctaatagcgaggctctaaccacacagcctacaatgctgcgtctcccatcttaactctttgcctttgccaccaactggccctcttcttacttgatgagtgtaacaagaaaggagagtcttgcagtgattaagtctctctttggactctcccctcttatgtacctcttttagtcattttgcttcatagctggttcctgctagaaatgggaaatgcctaagaagatgacttcccaactgcaagtcacaaaggaatggaggctctaattgaattttcaagcatctcctgaggatcagaaagtaatttcttctcaaagggtacttccactgatggaaacaaagtggaaggaaagatgctcaggtacagagaaggaatgtctttggtcctctcgccatctataggggccaaatatattctctttggtgtacaaaatgaattcattctggtctctctattaccactgaagatagaagaaaaaagaatgtcagaaaaacaataagagcgtttgcccaaatctgcctattgcagctgggagaagggggtcaaagcaaggatctttcacccacagaaagagagcactgaccccgatggcgatggactactgaagccctaactcagccaaccttacttacagcataagggagcgtagaatctgtgtagacgaagggggcatctggccttacacctcgttagggaagagaaacagggtgttgtcagcatcttctcactcccttctccttgataacagctaccatgacaaccctgtggtttccaaggagctgagaatagaaggaaactagcttacatgagaacagactggcctgaggagcagcagttgctggtggctaatggtgtaacctgagatgccctctggtagacacaggatagataactctttggatagcatgtctttttttctgttaattagttgtgtactctggcctctgtcatatcttcacaatggtgctcatttcatggggtattatccattcagtcatcgtaggtgatttgaaggtcttgatttgttttagaatgatgcacatttcatgtattcccagtttgtttattacttatttgggttgcatcagaaatgtctggagaataattctttgattatgactgttttttaaactaggaaaattggacattaagcatcacaaatgatattaaaaattggctagttgaatctattgggattttctacaagtattctgcctttgcagaaacagatttggtgaatttgaatctcaatttgagtaatctgatcgttctctctagctaatgggaaaatgattttacttagcaatgttatcttggtgtgttaagagttaggtttaacataaaggttattttctcctgatatagatcacataacagaatgcaccagtcatcaggctattcagttggtaagcttccaggaaaaaggacaggcagaaacgagtttgagacctgaatagctcccagatttcagtcttttcctgtttttgttaactttgggttaaaaaaaaaaaaaagtctgattggttttaattgaaggaaagatttgtactacagttcttctgttgtaaagagttgtgttgttcttttcccccaaagtggtttcagcaatatttaaggagatgtaagaggctttacaaaaaaacacttgatacttgttttcaaaccagtatacaagataagcttccaggctgcatagaaggaggagagggaaaatgttttgtaagaaaccaatcaagataaaggacagtgaagtaatccgtaccttgtgttttgttttgatttaataacataacaaataaccaacccttccctgaaaacctcacatgcatacatacacatatatacacacacaaagagagttaatcaactgaaagtgtttccttcatttctgatatagaattgcaattttaacacacataaaggataaacttttagaaacttatcttacaaagtgtattttat

SEQ ID NO: 28949 - DNA, 1531 bp, Homo Sapiens
agtcacagagggaacacagagcctagttgtaaacggacagagacgagaggggcaagggaggacagtggatgacagggaagacgagtgggggcagagctgctcaggaccatggctgaggccatcacctatgcagatctgaggtttgtgaaggctcccctgaagaagagcatctccagccggttaggacaggacccaggggctgatgatgatggggaaatcacctacgagaatgttcaagtgcccgcagtcctaggggtgccctcaagcttggcttcttctgtactaggggacaaagcagcggtcaagtcggagcagccaactgcgtcctggagagccgtgacgtcaccagctgtcgggcggattctcccctgccgcacaacctgcctgcgatacctcctgctcggcctgctcctcacctgcctgctgttaggagtgaccgccatctgcctgggagtgcgctatctgcaggtgtctcagcagctccagcagacgaacagggttctggaagtcactaacagcagcctgaggcagcagctccgcctcaagataacgcagctgggacagagtgcagaggatctgcaggggtccaggagagagctggcgcagagtcaggaagcactacaggtggaacagagggctcatcaggcggccgaagggcagctacaggcctgccaggcagacagacagaagacgaaggagaccttgcaaagtgaggagcaacagaggagggccttggagcagaagctgagcaacatggagaacagactgaagcccttcttcacatgcggctcagcagacacctgctgtccgtcgggatggataatgcatcagaaaagctgcttttacatctcacttacttcaaaaaattggcaggagagccaaaaacaatgtgaaactctgtcttccaagctggccacattcagtgaaatttatccacaatcacactcttactacttcttaaattcactgttgccaaatggtggttcagggaattcatattggactggcctcagctctaacaaggattggaagttgactgatgatacacaacgcactaggacttatgctcaaagctcaaaatgtaacaaggtacataaaacttggtcatggtggacactggagtcagagtcatgtagaagttctcttccctacatctgtgagatgacagctttcaggtttccagattaggacagtcctttgcactgagttgacactcatgccaacaagaacctgtgcccctccttcctaacctgaggcctggggttcctcagaccatctccttcattctgggcagtgccagccaccggctgacccacacctgacacttccagccagtctgctgcctgctccctcttcctgaaactggactgttcctgggaaaagggtgaagccacctctagaagggactttggcctccccccaagaacttcccatggtagaatggggtgggggaggagggcgcacgggctgagcggataggggcggcccggagccagccaggcagttttattgaaatctttttaaataattg

SEQ ID NO: 28950 - DNA, 1339 bp, Homo Sapiens
ggggatggcggttgtagcggcggctgccggctggctactcaggctcagggcggcaggggctgaggggcactggcgtcggcttcctggcgcggggctggcgcggggctttttgcaccccgccgcgactgtcgaggatgcggcccagaggcggcaggtggctcattttactttccagccagatccggagccccgggagtacgggcaaactcagaaaatgaatcttttccagtctgtaacaagtgccttggataactcattggccaaagatcctactgcagtaatatttggtgaagatgttgcctttggtggagtctttagatgcactgttggcttgcgagacaaatatggaaaagatagagtttttaataccccattgtgtgaacaaggaattgttggatttggaatcggaattgcggtcactggagctactgccattgcggaaattcagtttgcagattatattttccctgcatttgatcagattgttaatgaagctgccaagtatcgctatcgctctggggatctttttaactgtggaagcctcactatccggtccccttggggctgtgttggtcatggggctctctatcattctcagagtcctgaagcattttttgcccattgcccaggaatcaaggtggttatacccagaagccctttccaggccaaaggacttcttttgtcatgcatagaggataaaaatccttgtatattttttgaacctaaaatactttacagggcagcagcggaagaagtccctatagaaccatacaacatcccactgtcccaggccgaagtcatacaggaagggagtgatgttactctagttgcctggggcactcaggttcatgtgatccgagaggtagcttccatggcaaaagaaaagcttggagtgtcttgtgaagtcattgatctgaggactataataccttgggatgtggacacaatttgtaagtctgtgatcaaaacagggcgactgctaatcagtcacgaggctcccttgacaggcggctttgcatcggaaatcagctctacagttcaggaggaatgtttcttgaacctagaggctcctatatcaagagtatgtggttatgacacaccatttcctcacatttttgaaccattctacatcccagacaaatggaagtgttatgatgcccttcgaaaaatgatcaactattgaccatataggtaggtatgcatcttgagaaagctactatgtgcccctgacattaacgtactgttaaccaagacacagcaatcatcagtgttttgatggtaacaaactttgatggtaaagttgataaaaggcaactttcagaagaaaataatgtgcttt

SEQ ID NO: 28951 - DNA, 7390 bp, Homo Sapiens
gaattccgctttcaagaagatcagggacaactgatttgaagtctactctgtgcttctaaatccccaattctgctgaaagtgagataccctagagccctagagccccagcagcacccagccaaacccacctccaccatgggggccatgactcagctgttggcaggtgtctttcttgctttccttgccctcgctaccgaaggtggggtcctcaagaaagtcatccggcacaagcgacagagtggggtgaacgccaccctgccagaagagaaccagccagtggtgtttaaccacgtttacaacatcaagctgccagtgggatcccagtgttcggtggatctggagtcagccagtggggagaaagacctggcaccgccttcagagcccagcgaaagctttcaggagcacacagtagatggggaaaaccagattgtcttcacacatcgcatcaacatcccccgccgggcctgtggctgtgccgcagcccctgatgttaaggagctgctgagcagactggaggagctggagaacctggtgtcttccctgagggagcaatgtactgcaggagcaggctgctgtctccagcctgccacaggccgcttggacaccaggcccttctgtagcggtcggggcaacttcagcactgaaggatgtggctgtgtctgcgaacctggctggaaaggccccaactgctctgagcccgaatgtccaggcaactgtcaccttcgaggccggtgcattgatgggcagtgcatctgtgacgacggcttcacgggcgaggactgcagccagctggcttgccccagcgactgcaatgaccagggcaagtgcgtgaatggagtctgcatctgtttcgaaggctacgccggggctgactgcagccgtgaaatctgcccagtgccctgcagtgaggagcacggcacatgtgtagatggcttgtgtgtgtgccacgatggctttgcaggcgatgactgcaacaagcctctgtgtctcaacaattgctacaaccgtggacgatgcgtggagaatgagtgcgtgtgtgatgagggtttcacgggcgaagactgcagtgagctcatctgccccaatgactgcttcgaccggggccgctgcatcaatggcacctgctactgcgaagaaggcttcacaggtgaagactgcgggaaacccacctgcccacatgcctgccacacccagggccggtgtgaggaggggcagtgtgtatgtgatgagggctttgccggtttggactgcagcgagaagaggtgtcctgctgactgtcacaatcgtggccgctgtgtagacgggcggtgtgagtgtgatgatggtttcactggagctgactgcggggagctcaagtgtcccaatggctgcagtggccatggccgctgtgtcaatgggcagtgtgtgtgtgatgagggctatactggggaggactgcagccagctacggtgccccaatgactgtcacagtcggggccgctgtgtcgagggcaaatgtgtatgtgagcaaggcttcaagggctatgactgcagtgacatgagctgccctaatgactgtcaccagcacggccgctgtgtgaatggcatgtgtgtttgtgatgacggctacacaggggaagactgccgggatcgccaatgccccagggactgcagcaacaggggcctctgtgtggacggacagtgcgtctgtgaggacggcttcaccggccctgactgtgcagaactctcctgtccaaatgactgccatggccggggtcgctgtgtgaatgggcagtgcgtgtgccatgaaggatttatgggcaaagactgcaaggagcaaagatgtcccagtgactgtcatggccagggccgctgcgtggacggccagtgcatctgccacgagggcttcacaggcctggactgtggccagcactcctgccccagtgactgcaacaacttaggacaatgcgtctcgggccgctgcatctgcaacgagggctacagcggagaagactgctcagaggtgtctcctcccaaagacctcgttgtgacagaagtgacggaagagacggtcaacctggcctgggacaatgagatgcgggtcacagagtaccttgtcgtgtacacgcccacccacgagggtggtctggaaatgcagttccgtgtgcctggggaccagacgtccaccatcatccaggagctggaacctggtgtggagtactttatccgtgtatttgccatcctggagaacaagaagagcattcctgtcagcgccagggtggccacgtacttacctgcacctgaaggcctgaaattcaagtccatcaaggagacatctgtggaagtggagtgggatcctctagacattgcttttgaaacctgggagatcatcttccggaatatgaataaagaagatgagggagagatcaccaaaagcctgaggaggccagagacctcttaccggcaaactggtctagctcctgggcaagagtatgagatatctctgcacatagtgaaaaacaatacccggggccctggcctgaagagggtgaccaccacacgcttggatgcccccagccagatcgaggtgaaagatgtcacagacaccactgccttgatcacctggttcaagcccctggctgagatcgatggcattgagctgacctacggcatcaaagacgtgccaggagaccgtaccaccatcgatctcacagaggacgagaaccagtactccatcgggaacctgaagcctgacactgagtacgaggtgtccctcatctcccgcagaggtgacatgtcaagcaacccagccaaagagaccttcacaacaggcctcgatgctcccaggaatcttcgacgtgtttcccagacagataacagcatcaccctggaatggaggaatggcaaggcagctattgacagttacagaattaagtatgcccccatctctggaggggaccacgctgaggttgatgttccaaagagccaacaagccacaaccaaaaccacactcacaggtctgaggccgggaactgaatatgggattggagtttctgctgtgaaggaagacaaggagagcaatccagcgaccatcaacgcagccacagagttggacacgcccaaggaccttcaggtttctgaaactgcagagaccagcctgaccctgctctggaagacaccgttggccaaatttgaccgctaccgcctcaattacagtctccccacaggccagtgggtgggagtgcagcttccaagaaacaccacttcctatgtcctgagaggcctggaaccaggacaggagtacaatgtcctcctgacagccgagaaaggcagacacaagagcaagcccgcacatgtgaaggcatccactgaacaagcccctgagctggaaaacctcaccgtgactgaggttggctgggatggcctcagactcaactggaccgcagctgaccaggcctatgagcactttatcattcaggtgcaggaggccaacaaggtggaggcagctcggaacctcaccgtgcctggcagccttcgggctgtggacataccgggcctcaaggctgctacgccttatacagtctccatctatggggtgatccagggctatagaacaccagtgctctctgctgaggcctccacaggggaaactcccaatttgggagaggtcgtggtggccgaggtgggctgggatgccctcaaactcaactggactgctccagaaggggcctatgagtactttttcattcaggtgcaggaggctgacacagtagaggcagcccagaacctcaccgtcccaggaggactgaggtccacagacctgcctgggctcaaagcagccactcattataccatcaccatccgcggggtcactcaggacttcagcacaacccctctctctgttgaagtcttgacagaggaggttccagatatgggaaacctcacagtgaccgaggttagctgggatgctctcagactgaactggaccacgccagatggaacctatgaccagtttactattcaggtccaggaggctgaccaggtggaagaggctcacaatctcacggttcctggcagcctgcgttccatggaaatcccaggcctcagggctggcactccttacacagtcaccctgcacggcgaggtcaggggccacagcactcgaccccttgctgtagaggtcgtcacagaggatctcccacagctgggagatttagccgtgtctgaggttggctgggatggcctcagactcaactggaccgcagctgacaatgcctatgagcactttgtcattcaggtgcaggaggtcaacaaagtggaggcagcccagaacctcacgttgcctggcagcctcagggctgtggacatcccgggcctcgaggctgccacgccttatagagtctccatctatggggtgatccggggctatagaacaccagtactctctgctgaggcctccacagccaaagaacctgaaattggaaacttaaatgtttctgacataactcccgagagcttcaatctctcctggatggctaccgatgggatcttcgagacctttaccattgaaattattgattccaataggttgctggagactgtggaatataatatctctggtgctgaacgaactgcccatatctcagggctaccccctagtactgattttattgtctacctctctggacttgctcccagcatccggaccaaaaccatcagtgccacagccacgacagaggccctgccccttctggaaaacctaaccatttccgacattaatccctacgggttcacagtttcctggatggcatcggagaatgcctttgacagctttctagtaacggtggtggattctgggaagctgctggacccccaggaattcacactttcaggaacccagaggaagctggagcttagaggcctcataactggcattggctatgaggttatggtcctctggcttcacccaagggcatcaaacaagcccttgagggctgagattgttacagaagccgaaccggaagttgacaaccttctggtttcagatgccaccccagacggtttccgtctgtcctggacagctgatgaaggggtcttcgacaattttgttctcaaaatcagagataccaaaaagcagtctgagccactggaaataaccctacttgcccccgaacgtaccagggacttaacaggtctcagagaggctactgaatacgaaattgaactctatggaataagcaaaggaaggcgatcccagacagtcagtgctatagcaacaacagccatgggctccccaaaggaagtcattttctcagacatcactgaaaattcggctactgtcagctggagggcacccacagcccaagtggagagcttccggattacctatgtgcccattacaggaggtacaccctccatggtaactgtggacggaaccaagactcagaccaggctggtgaaactcatacctggcgtggagtaccttgtcagcatcatcgccatgaagggctttgaggaaagtgaacctgtctcagggtcattcaccacagctctggatggcccatctggcctggtgacagccaacatcactgactcagaagccttggccaggtggcagccagccattgccactgtggacagttatgtcatctcctacacaggcgagaaagtgccagaaattacacgcacggtgtccgggaacacagtggagtatgctctgaccgacctcgagcctgccacggaatacacactgagaatctttgcagagaaagggccccagaagagctcaaccatcactgccaagttcacaacagacctcgattctccaagagacttgactgctactgaggttcagtcggaaactgccctccttacctggcgacccccccgggcatcagtcaccggttacctgctggtctatgaatcagtggatggcacagtcaaggaagtcattgtgggtccagataccacctcctacagcctggcagacctgagcccatccacccactacacagccaagatccaggcactcaatgggcccctgaggagcaatatgatccagaccatcttcaccacaattggactcctgtaccccttccccaaggactgctcccaagcaatgctgaatggagacacgacctctggcctctacaccatttatctgaatggtgataaggctcaggcgctggaagtcttctgtgacatgacctctgatgggggtggatggattgtgttcctgagacgcaaaaacggacgcgagaacttctaccaaaactggaaggcatatgctgctggatttggggaccgcagagaagaattcctgcactggcttgggctggacaacctgaacaaaatcacagcccaggggcagtacgagctccgggtggacctgcgggaccatggggagacagcctttgctgtctatgacaagttcagcgtgggagatgccaagactcgctacaagctgaaggtggaggggtacagtgggacagcaggtgactccatggcctaccacaatggcagatccttctccacctttgacaaggacacagattcagccatcaccaactgtgctctgtcctacaaaggggctttctggtacaggaactgtcaccgtgtcaacctgatggggagatatggggacaataaccacagtcagggcgttaactggttccactggaagggccacgaacactcaatccagtttgctgagatgaagctgagaccaagcaacttcagaaatcttgaaggcaggcgcaaacgggcataaattccagggaccactgggtgagagaggaataaggcccagagcgaggaaaggattttaccaaagcatcaatacaaccagcccaaccatcggtccacacctgggcatttggtgagagtcaaagctgaccatggatccctggggccaacggcaacagcatgggcctcacctcctctgtgatttctttctttgcaccaaagacatcagtctccaacatgtttctgttttgttgtttgattcagcaaaaatctcccagtgacaacatcgcaatagttttttacttctcttaggtggctctgggaatgggagaggggtaggatgtacaggggtagtttgttttagaaccagccgtattttacatgaagctgtataattaattgtcattatttttgttagcaaagattaaatgtgtcattggaagccatccctttttttacatttcatacaacagaaaccagaaaagcaatactgtttccattttaaggatatgattaatattattaatataataatgatgatgatgatgatgaaaactaaggatttttcaagagatctttctttccaaaacatttctggacagtacctgattgtatttttttttttaaataaaagcacaagtacttttgagtttgttaaaacggaattc

SEQ ID NO: 28952 - DNA, 3205 bp, Homo Sapiens
ggaattccctggcctggcccggccccgccgcgctcccgctcgccccgacccgcactcgggcccgcccgggctccggcctgccgccgcctcttccttctccagccggcaggcccgcgccgcttaggagggagagcccacccgcgccaggaggccgaacgcggactcgccacccggcttcagaatggcagaagatgatccatatttgggaaggcctgaacaaatgtttcatttggatccttctttgactcatacaatatttaatccagaagtatttcaaccacagatggcactgccaacagcagatggcccataccttcaaatattagagcaacctaaacagagaggatttcgtttccgttatgtatgtgaaggcccatcccatggtggactacctggtgcctctagtgaaaagaacaagaagtcttaccctcaggtcaaaatctgcaactatgtgggaccagcaaaggttattgttcagttggtcacaaatggaaaaaatatccacctgcatgcccacagcctggtgggaaaacactgtgaggatgggatctgcactgtaactgctggacccaaggacatggtggtcggcttcgcaaacctgggtatacttcatgtgacaaagaaaaaagtatttgaaacactggaagcacgaatgacagaggcgtgtataaggggctataatcctggactcttggtgcaccctgaccttgcctatttgcaagcagaaggtggaggggaccggcagctgggagatcgggaaaaagagctaatccgccaagcagctctgcagcagaccaaggagatggacctcagcgtggtgcggctcatgtttacagcttttcttccggatagcactggcagcttcacaaggcgcctggaacccgtggtatcagacgccatctatgacagtaaagcccccaatgcatccaacttgaaaattgtaagaatggacaggacagctggatgtgtgactggaggggaggaaatttatcttctttgtgacaaagttcagaaagatgacatccagattcgattttatgaagaggaagaaaatggtggagtctgggaaggatttggagatttttcccccacagatgttcatagacaatttgccattgtcttcaaaactccaaagtataaagatattaatattacaaaaccagcctctgtgtttgtccagcttcggaggaaatctgacttggaaactagtgaaccaaaacctttcctctactatcctgaaatcaaagataaagaagaagtgcagaggaaacgtcagaagctcatgcccaatttttcggatagtttcggcggtggtagtggtgccggagctggaggcggaggcatgtttggtagtggcggtggaggagggggcactggaagtacaggtccagggtatagcttcccacactatggatttcctacttatggtgggattactttccatcctggaactactaaatctaatgctgggatgaagcatggaaccatggacactgaatctaaaaaggaccctgaaggttgtgacaaaagtgatgacaaaaacactgtaaacctctttgggaaagttattgaaaccacagagcaagatcaggagcccagcgaggccaccgttgggaatggtgaggtcactctaacgtatgcaacaggaacaaaagaagagagtgctggagttcaggataacctctttctagagaaggctatgcagcttgcaaagaggcatgccaatgcccttttcgactacgcggtgacaggagacgtgaagatgctgctggccgtccagcgccatctcactgctgtgcaggatgagaatggggacagtgtcttacacttagcaatcatccaccttcattctcaacttgtgagggatctactagaagtcacatctggtttgatttctgatgacattatcaacatgagaaatgatctgtaccagacgcccttgcacttggcagtgatcactaagcaggaagatgtggtggaggatttgctgagggctggggccgacctgagccttctggaccgcttgggtaactctgttttgcacctagctgccaaagaaggacatgataaagttctcagtatcttactcaagcacaaaaaggcagcactacttcttgaccaccccaacggggacggtctgaatgccattcatctagccatgatgagcaatagcctgccatgtttgctgctgctggtggccgctggggctgacgtcaatgctcaggagcagaagtccgggcgcacagcactgcacctggctgtggagcacgacaacatctcattggcaggctgcctgctcctggagggtgatgcccatgtggacagtactacctacgatggaaccacacccctgcatatagcagctgggagagggtccaccaggctggcagctcttctcaaagcagcaggagcagatcccctggtggagaactttgagcctctctatgacctggatgactcttgggaaaatgcaggagaggatgaaggagttgtgcctggaaccacgcctctagatatggccaccagctggcaggtatttgacatattaaatgggaaaccatatgagccagagtttacatctgatgatttactagcacaaggagacatgaaacagctggctgaagatgtgaagctgcagctgtataagttactagaaattcctgatccagacaaaaactgggctactctggcgcagaaattaggtctggggatacttaataatgccttccggctgagtcctgctccttccaaaacacttatggacaactatgaggtctctgggggtacagtcagagagctggtggaggccctgagacaaatgggctacaccgaagcaattgaagtgatccaggcagcctccagcccagtgaagaccacctctcaggcccactcgctgcctctctcgcctgcctccacaaggcagcaaatagacgagctccgagacagtgacagtgtctgcgacacgggcgtggagacatccttccgcaaactcagctttaccgagtctctgaccagtggtgcctcactgctaactctcaacaaaatgccccatgattatgggcaggaaggacctctagaaggcaaaatttagcctgctgacaatttcccacaccgtgtaaaccaaagccctaaaattcactgcgttgtccacaagacagaagctgaagtgcatcccaaaggtgctcagagagccggccggaattcc

SEQ ID NO: 28953 - DNA, 1876 bp, Homo Sapiens
cgcggccgcggttcgctgtggcgggcgcctgggccgccggctgtttaacttcgcttccgctggcccatagtgatctttgcagtgacccagcagcatcactgtttcttggcgtgtgaagataacccaaggaattgaggaagttgctgagaagagtgtgctggagatgctctaggaaaaaattgaatagtgagacgagttccagcgcaagggtttctggtttgccaagaagaaagtgaacatcatggatcagaacaacagcctgccaccttacgctcagggcttggcctcccctcagggtgccatgactcccggaatccctatctttagtccaatgatgccttatggcactggactgaccccacagcctattcagaacaccaatagtctgtctattttggaagagcaacaaaggcagcagcagcaacaacaacagcagcagcagcagcagcagcagcagcaacagcaacagcagcagcagcagcagcagcagcagcagcagcagcagcagcagcagcagcagcaacaggcagtggcagctgcagccgttcagcagtcaacgtcccagcaggcaacacagggaacctcaggccaggcaccacagctcttccactcacagactctcacaactgcacccttgccgggcaccactccactgtatccctcccccatgactcccatgacccccatcactcctgccacgccagcttcggagagttctgggattgtaccgcagctgcaaaatattgtatccacagtgaatcttggttgtaaacttgacctaaagaccattgcacttcgtgcccgaaacgccgaatataatcccaagcggtttgctgcggtaatcatgaggataagagagccacgaaccacggcactgattttcagttctgggaaaatggtgtgcacaggagccaagagtgaagaacagtccagactggcagcaagaaaatatgctagagttgtacagaagttgggttttccagctaagttcttggacttcaagattcagaacatggtggggagctgtgatgtgaagtttcctataaggttagaaggccttgtgctcacccaccaacaatttagtagttatgagccagagttatttcctggtttaatctacagaatgatcaaacccagaattgttctccttatttttgtttctggaaaagttgtattaacaggtgctaaagtcagagcagaaatttatgaagcatttgaaaacatctaccctattctaaagggattcaggaagacgacgtaatggctctcatgtacccttgcctcccccacccccttctttttttttttttaaacaaatcagtttgttttggtacctttaaatggtggtgttgtgagaagatggatgttgagttgcagggtgtggcaccaggtgatgcccttctgtaagtgcccaccgcgggatgccgggaaggggcattatttgtgcactgagaacaccgcgcagcgtgactgtgagttgctcataccgtgctgctatctgggcagcgctgcccatttatttatatgtagattttaaacactgctgttgacaagttggtttgagggagaaaactttaagtgttaaagccacctctataattgattggactttttaattttaatgtttttccccatgaaccacagtttttatatttctaccagaaaagtaaaaatcttttttaaaagtgttgtttttctaatttataactcctaggggttatttctgtgccagacacattccacctctccagtattgcaggacggaatatatgtgttaatgaaaatgaatggctgtacatatttttttctttcttcagagtactctgtacaataaatgcagtttataaaagtgttaaaaaaaaaaaaaaaaaaaaaa

SEQ ID NO: 28954 - DNA, 3688 bp, Homo Sapiens
ctgcagggtactcagcttctacttccactcctacacagctgcaagtgacttgaaaatatgaccatgcttcaaagtctccagtgattcccactgtgttgggacacaaagcccacctctctgccatgtgcccctgatggtcgctgccccagcttgtttgctttctgtagggcttgggtctttgccaacccctctacctgaattgctctccctgtaggactcatcatagctgaggcctttgcactccgctctttccactcacatgtcacctcagggctgtccccggcctctcctttcccatctctcccagtacattatggtccttccttcctagcatctggtgctatctacggtaggcatgtttagctgctggtacgatccctcctccactgaaatatgggcttcatgtctggcccctgtgggactgccagagcctggtcctcagtcatgtttagttgggctagtgaatcaactcttggtcaaagggacaaaagcagatgaggagatgtggcttcaatcaggatcagtgtggaacagtgagacctgcgcatggcactgctaggagggatgggttccacctcccagccttgggggtcctggcagccgacaggactttgcccactgggacttgtctgccaacctttgggtacagagccttagcttcacaggccccaagccaggagcccctccccaggtaggccagcagggatggagggaggcctgtcgagggtttcttgcacacgcacacactcagatccaagtctcagagtggtggtccctctgctggccctctcacctacccgctcctgttatcagaagtgtcgcaggtgacagtgtggtcactggggtgggaggaaatgggaggccctggatggggcccatgcccaagggtctggccatggccccttcattagggccccaattgtgactttattgctcatagtctcttccctgccttggtggctctcatcccccaaacctgaatgcagaagtcttggtcctagactcaactccgtgccacccttcagcctacgttgtgggttcctgctaagctgagcatttacctaacaatcaagacttctgacagtcctcagtcctgcccccaaacccccttggatttctctttttcaaggtggtttcggctaggagagtgagcgtggcttgggtgaggggcagatagggtgggagcatggggcatgtatggatgagaccttgacaaagggaccccggaggaaagacaggggccctttccccctttgtcctggaaacccggctcagccccagcccttgcccattctgctgctgctgcctggtaccttccacaaggccagactcctctccacaaagctgtggtctgcaccagctcctctggctctcctcctctgcctgctgagggccgcctcctagcctggctgccaatcacaggagaaaggggttgggattttgtttgtgcctctgtctgagcagagaatggctgataggccactgagcgttgccctggagagcccctctgtccctgctatccccatctcccctggcccagacttctgcccttcacgcccatccctgaccagcagccccactcagtctgggctctgggtgccagctgttatagacatgccacctgaacccaggccaggagctggtggatgcgtggggctattttaagcacagcctcttggcctgcacactcccctggcccccagcccccagcagctcagctactggtcacctgccaccgcctggaatgctgattggcagttggctggggtgggtgggggctgggaagacactattataaagctgggagtgttgggaagcagccgtccccgtccagagtcctctgtggtccctgctgccaccatggccactcaccgcctcgtgatggtccggcacggcgagagcacatggaaccaggagaaccgtttctgtggctggttcgatgcagagctgagtgaaaaggggaccgaggaggccaagcggggagccaaggccatcaaggatgccaagatggagtttgacatctgctacacgtcagtgctgaagcgggccatccgcaccctctgggccatcctggacggcacggaccagatgtggctgcctgtggtgcgcacttggcgcctcaatgagcggcattacgggggcctcacaggcctcaacaaggcagaaacggccgccaagcacggggaggagcaggtgaagatctggaggcgctccttcgacatcccgccgcccccgatggacgagaagcacccctactacaactccattagcaaggtgggctgcctttgctgggaaggcctctgggaagctgcagagtggggagtcgggtgggggcccactggcttgggagggaaagcagcgtgcctgtgtcccccaggagcgtcggtacgcaggcctgaagcccggggaactccccacctgcgagagcctcaaggacaccattgcccgggccctgcccttctggaacgaggagattgttccccagatcaaggccggcaagcgagtgctcattgcagcccacgggaacagcctgcggggcattgtcaagcacctggaaggtgaggccaccttcaggagcctgggcagggtgggtgggcagcagccccagctggcttctcatctcagcaaagtctctcgcccaggaccaggctttctaggcgtggggctccacatcattcactgaaaaaggagggctgagaagccattttttagttttgtgaaattttccccatttctgtgtaactgggacacactccacaggggctgactgcactcgaagctcgctgtgtcccgaggtggggcaggctccaaaggtggcatctgccaagggacacccagctaggaaacggaagggctgggcttagagcatctggctccaaatcccaacttactgtggggccctggacaagccacctccatctctgggcctctcccttttccggggtggtggggagctccccctggtactgaattcctcttgatgtaggcttggacccctcgcagggccctcccccatcaggtcctcagaatccctgcatgagcttcaccacctatctccctctggagcccctctctgggcaaaggaaagaccaatcaaaagaggggtgcaggactatggagtggccagactctgggcttgcagctgggctcccactgaagagcaagggctgacaaatgggcccgggatgcatgggcgcagtaaggcctcgcccagagtgactggcacctccctccgcctcccaccttagtattctgacacaagggcagtctaaattagcatctgaatgaccttaaagcttgttgagtcctggaaaggctagaagggtgtgccccagacctcctgctcctagggccgttgggcagttggccagagcacccagaccggcaggccccggagacccagccagccccaagcctgcccgctccaaacacggacacctggcacctggcactggggccaggcagagggaaggaccacctgcctcctctcccttccggagacttcatgcagccccatgaccctcccacagcctggtttggggaaaggggacgcacttttggtggtgaatatgagggatttcactctgactccccagagaacattttcttaaaccctcctgcacggagcaggggtggagtggcgcgaacatcaaaggtcgagctgctattcccagctcaggggctgcag

SEQ ID NO: 28955 - DNA, 3085 bp, Homo Sapiens
gagcagccaaaaggcccgcggagtcgcgctgggccgccccggcgcagctgaaccgggggccgcgcctgccaggccgacgggtctggcccagcctggcgccaaggggttcgtgcgctgtggagacgcggagggtcgaggcggcgcggcctgagtgaaacccaatggaaaaagcatgacatttagaagtagaagacttagcttcaaatccctactccttcacttactaattttgtgatttggaaatatccgcgcaagatgttgacgttgcagacttgggtagtgcaagccttgtttattttcctcaccactgaatctacaggtgaacttctagatccatgtggttatatcagtcctgaatctccagttgtacaacttcattctaatttcactgcagtttgtgtgctaaaggaaaaatgtatggattattttcatgtaaatgctaattacattgtctggaaaacaaaccattttactattcctaaggagcaatatactatcataaacagaacagcatccagtgtcacctttacagatatagcttcattaaatattcagctcacttgcaacattcttacattcggacagcttgaacagaatgtttatggaatcacaataatttcaggcttgcctccagaaaaacctaaaaatttgagttgcattgtgaacgaggggaagaaaatgaggtgtgagtgggatggtggaagggaaacacacttggagacaaacttcactttaaaatctgaatgggcaacacacaagtttgctgattgcaaagcaaaacgtgacacccccacctcatgcactgttgattattctactgtgtattttgtcaacattgaagtctgggtagaagcagagaatgcccttgggaaggttacatcagatcatatcaattttgatcctgtatataaagtgaagcccaatccgccacataatttatcagtgatcaactcagaggaactgtctagtatcttaaaattgacatggaccaacccaagtattaagagtgttataatactaaaatataacattcaatataggaccaaagatgcctcaacttggagccagattcctcctgaagacacagcatccacccgatcttcattcactgtccaagaccttaaaccttttacagaatatgtgtttaggattcgctgtatgaaggaagatggtaagggatactggagtgactggagtgaagaagcaagtgggatcacctatgaagatagaccatctaaagcaccaagtttctggtataaaatagatccatcccatactcaaggctacagaactgtacaactcgtgtggaagacattgcctccttttgaagccaatggaaaaatcttggattatgaagtgactctcacaagatggaaatcacatttacaaaattacacagttaatgccacaaaactgacagtaaatctcacaaatgatcgctatctagcaaccctaacagtaagaaatcttgttggcaaatcagatgcagctgttttaactatccctgcctgtgactttcaagctactcaccctgtaatggatcttaaagcattccccaaagataacatgctttgggtggaatggactactccaagggaatctgtaaagaaatatatacttgagtggtgtgtgttatcagataaagcaccctgtatcacagactggcaacaagaagatggtaccgtgcatcgcacctatttaagagggaacttagcagagagcaaatgctatttgataacagttactccagtatatgctgatggaccaggaagccctgaatccataaaggcataccttaaacaagctccaccttccaaaggacctactgttcggacaaaaaaagtagggaaaaacgaagctgtcttagagtgggaccaacttcctgttgatgttcagaatggatttatcagaaattatactatattttatagaaccatcattggaaatgaaactgctgtgaatgtggattcttcccacacagaatatacattgtcctctttgactagtgacacattgtacatggtacgaatggcagcatacacagatgaaggtgggaaggatggtccagaattcacttttactaccccaaagtttgctcaaggagaaattgaagccatagtcgtgcctgtttgcttagcattcctattgacaactcttctgggagtgctgttctgctttaataagcgagacctaattaaaaaacacatctggcctaatgttccagatccttcaaagagtcatattgcccagtggtcacctcacactcctccaaggcacaattttaattcaaaagatcaaatgtattcagatggcaatttcactgatgtaagtgttgtggaaatagaagcaaatgacaaaaagccttttccagaagatctgaaatcattggacctgttcaaaaaggaaaaaattaatactgaaggacacagcagtggtattggggggtcttcatgcatgtcatcttctaggccaagcatttctagcagtgatgaaaatgaatcttcacaaaacacttcgagcactgtccagtattctaccgtggtacacagtggctacagacaccaagttccgtcagtccaagtcttctcaagatccgagtctacccagcccttgttagattcagaggagcggccagaagatctacaattagtagatcatgtagatggcggtgatggtattttgcccaggcaacagtacttcaaacagaactgcagtcagcatgaatccagtccagatatttcacattttgaaaggtcaaagcaagtttcatcagtcaatgaggaagattttgttagacttaaacagcagatttcagatcatatttcacaatcctgtggatctgggcaaatgaaaatgtttcaggaagtttctgcagcagatgcttttggtccaggtactgagggacaagtagaaagatttgaaacagttggcatggaggctgcgactgatgaaggcatgcctaaaagttacttaccacagactgtacggcaaggcggctacatgcctcagtgaaggactagtagttcctgctacaacttcagcagtacctataaagtaaagctaaaatgattttatctgtgaattc

SEQ ID NO: 28956 - DNA, 5055 bp, Homo Sapiens
cgatactacgtgggcatttttggtcgaagagagctgaagtaatgagaagacatcatggaggcccagtcccacagctccacgaccactgaaaagaaaaaagttgagaattccatagtgaagtgctccactcgaacagatgtgagcgagaaagccgttgcctccagcaccacttctaatgaggatgaaagtcctggacagacttatcacagagagagaagaaacgcaatcactatgcagccacagaatgtccaggggctcagcaaagtcagtgaggaaccttcaacatcgagtgacgagagggcctcattgatcaagaaagagatccatgggtccctgccacacgtggcggagccctctgtgccgtaccgcgggacggtgtttgccatggaccccaggaatggttacatggagccccactaccaccctcctcatcttttccctgccttccatcctcctgtaccaattgatgccagacatcatgagggccgttaccattacgatccatctccgattcctccattgcatatgacttccgccttatctagtagccctacgtatccggacctgcccttcattaggatctccccacaccggaaccccgctgctgcttccgagtctcccttcagccctccacatccctacattaatccctacatggactatatccgctccttgcacagcagcccatcgctctccatgatctcagcaacccgtgggctgagccctacagatgcgccccatgcaggagtcagcccagcagaatactatcatcagatggccctgctaactggccagcgcagcccctatgcagacattattccctcagctgccaccgccggcacgggggccatccacatggaatatcttcatgctatggatagcaccagattctccagccccaggctgtcagccaggccgagccgaaaacgtacactgtccatatcaccactctccgatcatagctttgaccttcagaccatgataaggacgtctcccaactccttggtcacgattctcaataattcccgtagcagctcttcagcaagtggctcctatggtcacttatctgcaagtgcaatcagccctgccttgagcttcacctactcttccgcgcccgtctctctccacatgcatcagcagatcctaagccgacaacagagcttaggttcagcctttggacacagccctccactcatccaccctgccccaacttttccaacacagaggcctattccagggatccctacggttctgaaccccgtccaggtcagctccggcccttctgagtcctcacagaacaagcccacgagtgagtctgcagtgagcagcactggtgacccgatgcacaacaagaggtccaagatcaaacccgatgaagacctccccagcccaggggctcgggggcagcaggaacagcccgaaggaacaacccttgtcaaggaggaaggggacaaagatgaaagcaaacaggagcctgaagtcatctatgagacaaactgccactgggaaggctgcgcgagggagttcgacacccaagagcagcttgtgcaccatataaataacgaccatattcatggagagaagaaggagttcgtgtgcaggtggctggactgctcaagagagcagaaacccttcaaagcccagtatatgttggtagtgcatatgagaagacacacgggcgagaagcctcacaaatgcacttttgaaggttgcacaaaggcctactcgagactagaaaacttgaaaacacacttgagatctcacactggagagaaaccatacgtctgtgagcacgaaggttgcaacaaggctttctcaaatgcctctgatcgcgccaaacaccaaaacagaacgcattccaatgagaaaccatatgtgtgcaaaatcccaggctgcactaagcgttacacagacccaagctccctccggaaacatgtgaagacagtgcatggcccagaggctcatgtcaccaagaagcagcgaggggacatccatcctcggccgccacccccgagagattccggcagccattcacagtccaggtcgcctggccgaccgactcagggagcccttggtgagcagcaggacctcagcaacactacctcaaagcgggaagaatgcctccaggtgaaaaccgtcaaggcagagaagccaatgacatctcagccaagccctggtggtcagtcttcatgcagcagccaacagtcccccatcagcaactattccaacagtgggctcgagcttcctctgaccgatggaggtagtataggagacctcagtgccatcgatgaaaccccaatcatggactcaaccatttccactgcaaccacagcccttgctttgcaagccaggagaaacccggcagggaccaaatggatggagcacgtaaaactagaaaggctaaaacaagtgaatggaatgtttccgcgactgaaccccattctaccccctaaagcccctgcggtctctcctctcataggaaatggcacacagtccaacaacacctgcagcttgggtgggcccatgacgcttctcccgggcagaagcgacctctctggggtggacgtcactatgctgaacatgctcaacagaagggacagcagcgccagcaccatcagctcggcctacctgagcagccgccgctcctcagggatctcgccctgcttctccagccgccgctccagcgaggcgtcacaggccgagggccggccgcagaacgtgagcgtggccgactcctacgaccccatctccaccgacgcctcgcgccgctccagcgaagccagccagagcgacggcctgcccagcctgctcagcctcacgcccgcccagcagtaccgcctcaaggccaagtacgcggctgccacaggagggccgccgccgacgcccctgcccaacatggagaggatgagcctgaagacgcgcctggcgctgctcggggatgccctcgagcctggcgtggccctgcctccagttcatgccccgaggaggtgcagcgacgggggagcccacggctacgggcggcgccacctgcagccgcacgatgcgctgggccacggcgtgaggagggccagcgacccggtgcggacaggctccgagggcctggccctgcctcgtgtgccgcgcttcagcagcctcagcagctgcaaccccccggcgatggccacgtccgcggagaagcgcagtctcgtgcttcagaattacacgcggcccgagggcggccagtcccgaaacttccactcgtccccctgtcctcccagcatcaccgagaacgtcaccctggagtccctgaccatggacgctgatgccaacctgaacgatgaggatttcctgccggacgacgtggtgcagtatttaaattcccagaaccaagcagggtacgagcagcacttccccagcgccctcccggacgacagcaaagtgccccacgggcccggtgactttgacgcgcccgggctgccagacagccacgctggccagcagttccatgccctcgagcagccctgccccgagggcagcaaaaccgacctgcccattcagtggaacgaagtcagctccggaagcgccgacctgtcctcctccaagctcaagtgtgggccgcggcccgctgtgccgcagactcgcgcctttgggttctgcaacggcatggtcgtccacccgcagaaccccttgaggagcgggcctgctgggggctatcagaccctcggggagaacagcaacccctacggtggcccagagcacttgatgctccacaacagccccggaagtggcaccagtggaaacgccttccatgaacagccctgtaaggccccgcagtatgggaactgtctcaacaggcagccagtggcccctggtgcactcgacggtgcctgtggtgccgggattcaagcctcaaagctgaagagcacccccatgcaagggagcgggggccagctgaatttcggcctgccggtagcgccaaatgagtcagctggcagcatggtgaatggcatgcagaaccaggacccagtgggacaggggtacctggctcaccagctcctcggcgacagcatgcagcacccgggggcaggccgccccggtcagcagatgcttgggcagattagtgctacctcacacatcaacatctaccaagggccagagagctgcctgccaggggctcacggcatgggcagccagccgtcaagcttggcagttgtcaggggctaccagccatgtgccagctttgggggcagcaggcgccaggctatgccgagggacagccttgctctgcagtcaggacagctcagtgacacaagtcagacctgcagggtgaatggtatcaagatggagatgaaagggcagccccatccgctgtgctctaatctgcagaattactctggtcagttctatgaccaaaccgtgggcttcagtcagcaagacacgaaagctggttcattctctatttcagacgccagctgcctgctacaggggaccagcgccaaaaactctgagttactttccccaggtgctaatcaggtgacaagcacagtggacagcctcgacagccatgacctggaaggggtacagattgacttcgatgccatcatagacgatggggaccactccagcctgatgtcgggggccctgagcccaagtatcattcagaacctttcccatagctcctcccgcctcaccacgcctcgggcgtccctcccattcccagtcgctgtccatgagcaccaccaacatggctatcggggacatgagttctttgctgacctccctagcggaagaaagcaaattccttgcagttatgcaataggctttaggaaaaaaagactgcaaccaacggaaatcaataggagttgaagagattaaactgactttgttttggctgtttttttagttctgtatgtattttagcaatctcatctcacctaactgagatgtgtttcaattatattccttttatggaaaaggactctgaaaaaccctaaagtattctagggagaaactgtcttccatttcagttttgaatcagtattgttacactcaaaccaccctctttttaaaaaaaaa

SEQ ID NO: 28957 - DNA, 2520 bp, Homo Sapiens
cgcgcgctgcctgaggacgccgcggcccccgcccccgccatgggcgcccctgcctgcgccctcgcgctctgcgtggccgtggccatcgtggccggcgcctcctcggagtccttggggacggagcagcgcgtcgtggggcgagcggcagaagtcccgggcccagagcccggccagcaggagcagttggtcttcggcagcggggatgctgtggagctgagctgtcccccgcccgggggtggtcccatggggcccactgtctgggtcaaggatggcacagggctggtgccctcggagcgtgtcctggtggggccccagcggctgcaggtgctgaatgcctcccacgaggactccggggcctacagctgccggcagcggctcacgcagcgcgtactgtgccacttcagtgtgcgggtgacagacgctccatcctcgggagatgacgaagacggggaggacgaggctgaggacacaggtgtggacacaggggccccttactggacacggcccgagcggatggacaagaagctgctggccgtgccggccgccaacaccgtccgcttccgctgcccagccgctggcaaccccactccctccatctcctggctgaagaacggcagggagttccgcggcgagcaccgcattggaggcatcaagctgcggcatcagcagtggagcctggtcatggaaagcgtggtgccctcggaccgcggcaactacacctgcgtcgtggagaacaagtttggcagcatccggcagacgtacacgctggacgtgctggagcgctccccgcaccggcccatcctgcaggcggggctgccggccaaccagacggcggtgctgggcagcgacgtggagttccactgcaaggtgtacagtgacgcacagccccacatccagtggctcaagcacgtggaggtgaacggcagcaaggtgggcccggacggcacaccctacgttaccgtgctcaagacggcgggcgctaacaccaccgacaaggagctagaggttctctccttgcacaacgtcacctttgaggacgccggggagtacacctgcctggcgggcaattctattgggttttctcatcactctgcgtggctggtggtgctgccagccgaggaggagctggtggaggctgacgaggcgggcagtgtgtatgcaggcatcctcagctacggggtgggcttcttcctgttcatcctggtggtggcggctgtgacgctctgccgcctgcgcagcccccccaagaaaggcctgggctcccccaccgtgcacaagatctcccgcttcccgctcaagcgacaggtgtccctggagtccaacgcgtccatgagctccaacacaccactggtgcgcatcgcaaggctgtcctcaggggagggccccacgctggccaatgtctccgagctcgagctgcctgccgaccccaaatgggagctgtctcgggcccggctgaccctgggcaagccccttggggagggctgcttcggccaggtggtcatggcggaggccatcggcattgacaaggaccgggccgccaagcctgtcaccgtagccgtgaagatgctgaaagacgatgccactgacaaggacctgtcggacctggtgtctgagatggagatgatgaagatgatcgggaaacacaaaaacatcatcaacctgctgggcgcctgcacgcagggcgggcccctgtacgtgctggtggagtacgcggccaagggtaacctgcgggagtttctgcgggcgcggcggcccccgggcctggactactccttcgacacctgcaagccgcccgaggagcagctcaccttcaaggacctggtgtcctgtgcctaccaggtggcccggggcatggagtacttggcctcccagaagtgcatccacagggacctggctgcccgcaatgtgctggtgaccgaggacaacgtgatgaagatcgcagacttcgggctggcccgggacgtgcacaacctcgactactacaagaagacaaccaacggccggctgcccgtgaagtggatggcgcctgaggccttgtttgaccgagtctacactcaccagagtgacgtctggtcctttggggtcctgctctgggagatcttcacgctggggggctccccgtaccccggcatccctgtggaggagctcttcaagctgctgaaggagggccaccgcatggacaagcccgccaactgcacacacgacctgtacatgatcatgcgggagtgctggcatgccgcgccctcccagaggcccaccttcaagcagctggtggaggacctggaccgtgtccttaccgtgacgtccaccgacgagtacctggacctgtcggcgcctttcgagcagtactccccgggtggccaggacacccccagctccagctcctcaggggacgactccgtgtttgcccacgacctgctgcccccggccccacccagcagtgggggctcgcggacgtgaagggccactggtccccaacaatgtgaggggtccctagcagccctccctgctgctggtgca

SEQ ID NO: 28958 - DNA, 2297 bp, Homo Sapiens
cggctgtgttgcgcagtcttcatgggttcccgacgaggaggtctctgtggctgcggcggctgctaactgcgccacctgctgcagcctgtccccgccgctctgaagcggccgcgtcgaagccgaaatgccgccaccccggaccggccgaggccttctctggctgggtctggttctgagctccgtctgcgtcgccctcggatccgaaacgcaggccaactcgaccacagatgctctgaacgttcttctcatcatcgtggatgacctgcgcccctccctgggctgttatggggataagctggtgaggtccccaaatattgaccaactggcatcccacagcctcctcttccagaatgcctttgcgcagcaagcagtgtgcgccccgagccgcgtttctttcctcactggcaggagacctgacaccacccgcctgtacgacttcaactcctactggagggtgcacgctggaaacttctccaccatcccccagtacttcaaggagaatggctatgtgaccatgtcggtgggaaaagtctttcaccctgggatatcttctaaccataccgatgattctccgtatagctggtcttttccaccttatcatccttcctctgagaagtatgaaaacactaagacatgtcgagggccagatggagaactccatgccaacctgctttgccctgtggatgtgctggatgttcccgagggcaccttgcctgacaaacagagcactgagcaagccatacagttgttggaaaagatgaaaacgtcagccagtcctttcttcctggccgttgggtatcataagccacacatccccttcagataccccaaggaatttcagaagttgtatcccttggagaacatcaccctggcccccgatcccgaggtccctgatggcctaccccctgtggcctacaacccctggatggacatcaggcaacgggaagacgtccaagccttaaacatcagtgtgccgtatggtccaattcctgtggactttcagcggaaaatccgccagagctactttgcctctgtgtcatatttggatacacaggtcggccgcctcttgagtgctttggacgatcttcagctggccaacagcaccatcattgcatttacctcggatcatgggtgggctctaggtgaacatggagaatgggccaaatacagcaattttgatgttgctacccatgttcccctgatattctatgttcctggaaggacggcttcacttccggaggcaggcgagaagcttttcccttacctcgacccttttgattccgcctcacagttgatggagccaggcaggcaatccatggaccttgtggaacttgtgtctctttttcccacgctggctggacttgcaggactgcaggttccacctcgctgccccgttccttcatttcacgttgagctgtgcagagaaggcaagaaccttctgaagcattttcgattccgtgacttggaagaggatccgtacctccctggtaatccccgtgaactgattgcctatagccagtatccccggccttcagacatccctcagtggaattctgacaagccgagtttaaaagatataaagatcatgggctattccatacgcaccatagactataggtatactgtgtgggttggcttcaatcctgatgaatttctagctaacttttctgacatccatgcaggggaactgtattttgtggattctgacccattgcaggatcacaatatgtataatgattcccaaggtggagatcttttccagttgttgatgccttgagttttgccaaccatggatggcaaatgtgatgtgctcccttccagctggtgagaggaggagttagagctggtcgttttgtgattacccataatattggaagcagcctgagggctagttaatccaaacatgcatcaacaatttggcctgagaatatgtaacagccaaaccttttcgtttagtctttattaaaatttataattggtaattggaccagttttttttttaatttccctctttttaaaacagttacggcttatttactgaataaatacaaagcaaacaaactcaagttatgtcatacctttggatacgaagaccatacataataaccaaacataacattatacacaaagaatactttcattatttgtggaatttagtgcatttcaaaaagtaatcatatatcaaactaggcaccacactaagttcctgattattttgtttataatttaataatatatcttatgagccctatatattcaaaatattatgttaacatgtaatccatgtttctttttcc

SEQ ID NO: 28959 - DNA, 2297 bp, Homo Sapiens; identical to SEQ ID NO: 28958

SEQ ID NO: 28960 - DNA, 3545 bp, Homo Sapiens
gttaagaagttagcaaatgatgtaaaagaaaatgaagaccatctaaatggcttaaaaaccaggatagaaaatgctgatgctagaaatggggatctcttgagaactttgaatgacactttgggaaagttatcagctattccaaatgatacagctgctaaactgcaagctgttaaggacaaagccagacaagccaacgacacagctaaagatgtactggcacagattacagagctccaccagaacctcgatggcctgaagaagaattacaataaactagcagacagcgtcgccaaaacgaatgctgtggttaaagatccttccaagaacaaaatcattgccgatgcagatgccactgtcaaaaatttagaacaggaagctgaccggctaatagataaactcaaacccatcaaggaacttgaggataacctaaagaaaaacatctctgagataaaggaattgataaaccaagctcggaaacaagccaattctatcaaagtatctgtgtcttcaggaggtgactgcattcgaacatacaaaccagaaatcaagaaaggaagttacaataatattgttgtcaacgtaaagacagctgttgctgataacctcctcttttatcttggaagtgccaaatttattgactttctggctatagaaatgcgtaaaggcaaagtcagcttcctctgggatgttggatctggagttggacgtgtagagtacccagatttgactattgatgactcatattggtaccgtatcgtagcatcaagaactgggagaaatggaactatttctgtgagagccctggatggacccaaagccagcattgtgcccagcacacaccattcgacgtctcctccagggtacacgattctagatgtggatgcaaatgcaatgctgtttgttggtggcctgactgggaaattaaagaaggctgatgctgtacgtgtgattacattcactggctgcatgggagaaacatactttgacaacaaacctataggtttgtggaatttccgagaaaaagaaggtgactgcaaaggatgcactgtcagtcctcaggtggaagatagtgaggggactattcaatttgatggagaaggttatgcattggtcagccgtcccattcgctggtaccccaacatctccactgtcatgttcaagttcagaacattttcttcgagtgctcttctgatgtatcttgccacacgagacctgagagatttcatgagtgtggagctcactgatgggcacataaaagtcagttacgatctgggctcaggaatggcttccgttgtcagcaatcaaaaccataatgatgggaaatggaaatcattcactctgtcaagaattcaaaaacaagccaatatatcaattgtagatatagatactaatcaggaggagaatatagcaacttcgtcttctggaaacaactttggtcttgacttgaaagcagatgacaaaatatattttggtggcctgccaacgctgagaaacttgagtatgaaagcaaggccagaagtaaatctgaagaaatattccggctgcctcaaagatattgaaatttcaagaactccgtacaatatactcagtagtcccgattatgttggtgttaccaaaggatgttccctggagaatgtttacacagttagctttcctaagcctggttttgtggagctctcccctgtgccaattgatgtaggaacagaaatcaacctgtcattcagcaccaagaatgagtccggcatcattcttttgggaagtggagggacaccagcaccacctaggagaaaacgaaggcagactggacaggcctattatgtaatactcctcaacaggggccgtctggaagtgcatctctccacaggggcacgaacaatgaggaaaattgtcatcagaccagagccgaatctgtttcatgatggaagagaacgttccgttcatgtagagcgaactagaggcatctttacagttcaagtggatgaaaacagaagatacatgcaaaacctgacagttgaacagcctatcgaagttaaaaagcttttcgttgggggtgctccacctgaatttcaaccttccccactcagaaatattcctccttttgaaggctgcatatggaatcttgttattaactctgtccccatggactttgcaaggcctgtgtccttcaaaaatgctgacattggtcgctgtgcccatcagaaactccgtgaagatgaagatggagcagctccagctgaaatagttatccagcctgagccagttcccaccccagcctttcctacgcccaccccagttctgacacatggtccttgtgctgcagaatcagaaccagctcttttgatagggagcaagcagttcgggctttcaagaaacagtcacattgcaattgcatttgatgacaccaaagttaaaaaccgtctcacaattgagttggaagtaagaaccgaagctgaatccggcttgcttttttacatggctcgcatcaatcatgctgattttgcaacagttcagctgagaaatggattgccctacttcagctatgacttggggagtggggacacccacaccatgatccccaccaaaatcaatgatggccagtggcacaagattaagataatgagaagtaagcaagaaggaattctttatgtagatggggcttccaacagaaccatcagtcccaaaaaagccgacatcctggatgtcgtgggaatgctgtatgttggtgggttacccatcaactacactacccgaagaattggtccagtgacctatagcattgatggctgcgtcaggaatctccacatggcagaggcccctgccgatctggaacaacccacctccagcttccatgttgggacatgttttgcaaatgctcagaggggaacatattttgacggaaccggttttgccaaagcagttggtggattcaaagtgggattggaccttcttgtagaatttgaattccgcacaactacaacgactggagttcttctggggatcagtagtcaaaaaatggatggaatgggtattgaaatgattgatgaaaagttgatgtttcatgtggacaatggtgcgggcagattcactgctgtctatgatgctggggttccagggcatttgtgtgatggacaatggcataaagtcactgccaacaagatcaaacaccgcattgagctcacagtcgatgggaaccaggtggaagcccaaagcccaaacccagcatctacatcagctgacacaaatgaccctgtgtttgttggaggcttcccagatgacctcaagcagtttggcctaacaaccagtattccgttccgaggttgcatcagatccctgaagctcaccaaaggcacagcaagccactggaggttaattttgccaaggccctggaactgaggggcgttcaacctgtatcatgcccagccaactaataaaaataagtgtaaccccaggaagagtctgtcaaaacaagtatatcaagtaaaacaaacaaatatattttacctatatatgttaattaaactaatttgtgcatgtacatagaattc

SEQ ID NO: 28961 - DNA, 3545 bp, Homo Sapiens; identical to SEQ ID NO: 28960

SEQ ID NO: 28962 - DNA, 2139 bp, Homo Sapiens
gaggtgggaggagttccctgcagcctgcggggccaagaagaaagtgctaagctgaggagccgcagtcggaggaccccagggacccgacaggaagtctccgtacgaccccaacggatccacatgcccggaagcccaggcgacactaagccagcgctggggaactgacgtactcctgcagtcgcagggcgctccatgcctctctgtcctcttctttgttgtgggtaacgttctctgcgggagacctgaggttttccaagggggacatgccagctacactggccttggcgccctgagctaagcaccaggactcacagcctagcacgaaggcaggtagcaccttcacccgccgcggacgataggcgctctcctgtacctcctttagctcgcgaggcccgcccttcgcgaggtcccagagaaaagcaggctgtggaaaactggcgcccccttctttcacccaccttcttacccctgtcagcgccgagatctgtagcagaggttcctggtctgaaccaccgattggcaaagaaagctgcagattaaacttctcgttttacagagaaggaaactgaggcccagacagccgaaggagaggcagtctatggagcgcagcggtaaagagcaaggggttggtggccccagaatggaacctcagctctgccaggtaaccaacagctgtgtgaccctagacgagttccgcagtctctctgagcctcagtttccttactggtcaaacgggataatgggatactagcgcccacctcatagagttgttctgaggattagataggagagcagtgtgggcctttgactcaatcaactttacagtttttgttactactactgtttaaggacaggaaacaagttagtggcaacgcgagctgaaacccgggtctctcaacgtccagttggaggttttacccaccacccctctacctgttcagagctaatgggatgcagaggcgaggacagcccctggaaaaccatgtggcgttgatacactggcaaagcgcaggcatcccggcctcgaaggtgcataattattgcaatatgaaaaaatcgaggctgggtaggagcagggcagtgaggatttctcaacccttactttcaccccggcgctgtccactgcatctgacagagcgcggagctgggctgctacagccgcaaccccagggaccagtgcgcacgcctgggccgccctccgggagtcacccagcggccgcggacaactgaataaacaccccaaagcgctgcggtcggtcaagggcggggacagccacagtgcgcgcggggcccgcaggccgtaataaagagtggctcgacctcgctgctggcctgtcgcgggagaggaacaagctttcgactagcgcctctccccggggcccgcgccccgagccccacgccaagacagcccaacagctgttcctcccctccccgccgactccaactcttcggaatctgcccactcgggggctgcagggcaagtgtttaggatggttcccagccccgcgctgcgcggtgaaaatttcaacgtcattccttcaattaaaaaaaggggggggcaagggaggggctttgtgataactactcccagcttcttctgatcatttcaaaattaagtcgattttttttaaccagtccccacttactgtcctaactctcctcgctgaccctatctgggagccggaaccgttaggtactgccgaatgcggtgcaaatttcccctctcccccagttcgcagtgcctggagccgctggggttactcgtctgttctgatgccaccgcgagatggtccccgagctccccgagagtcctcagtgaaaggattccgcggcactgcctctattattataccgtaaatctttttaaattctggaactaattatatagaggatatgtctcaatttgttctgcattaatgccacagtggggatggaggccaggccgtggccagagcagatacgtaggcccatgaaattgatgaactgagagttgtcttccagtcctgagcgcaccatctggaattccagtctgaggttacaattagaactcctgaccccagattcaactttgtaaacaacaggggaaaaaaatggggaaaagaaaaaccacgagcgaggaaaaaaattatctgcacctgt

SEQ ID NO: 28963 - DNA, 609 bp, Homo Sapiens
acccgccctgctctctgtttggtagcgtatccagtatgccaagaccgactcagatatcattgccaagatgaaaggcaccttcgtggagcgggaccgcaagcgggagaagaggaagcccaagagccaggagaccccggccaccaagaaggctgtgcaaggcgggggagccacccccgtggtgggggctgtccaggggcctgtcccggtaagccaggtcccggagaccaaccctcccactgccagaccttcctcagccacatggactggctttgggacagggtggggagagttctccccttggggcttcagacccctcctttccatttctttatagagatgtgtttctctctctcttttggggggtattgagcacctagatgatgctatctcctttcgaaactcttgttccctccttgtgactgtttctcaaggtctttcttcatggctatgacttggtttcgctctctccgtggccttgattttgtcgcctgtgtcttgtaactcattgtgcatgtagaaaatccaagtgtctactaagcaactgttaggattaataagtgaacttaaatttagaaagatcgctggatataaaggcaatatggaaaaaaa

SEQ ID NO: 28964 - DNA, 3853 bp, Homo Sapiens
acgcgctcacacacagagagaaaatccttctgcctgttgatttatggaaacaattatgattctgctggagaacttttcagctgagaaatagtttgtagctacagtagaaaggctcaagttgcaccaggcagacaacagacatggaattcttatatatccagctgttagcaacaaaacaaaagtcaaatagcaaacagcgtcacagcaactgaacttactacgaactgtttttatgaggatttatcaacagagttatttaaggaggaatcctgtgttgttatcaggaactaaaaggataaggctaacaatttggaaagagcaagtactctttcttaaatcaatctacaattcacagataggaagaggtcaatgacctaggagtaacaatcaactcaagattcattttcattatgttattcatgaacacccggagcactacactataatgcacaaatggatactgacatggatcctgccaactttgctctacagatcatgctttcacattatctgtctagtgggtactatatctttagcttgcaatgacatgactccagagcaaatggctacaaatgtgaactgttccagccctgagcgacacacaagaagttatgattacatggaaggaggggatataagagtgagaagactcttctgtcgaacacagtggtacctgaggatcgataaaagaggcaaagtaaaagggacccaagagatgaagaataattacaatatcatggaaatcaggacagtggcagttggaattgtggcaatcaaaggggtggaaagtgaattctatcttgcaatgaacaaggaaggaaaactctatgcaaagaaagaatgcaatgaagattgtaacttcaaagaactaattctggaaaaccattacaacacatatgcatcagctaaatggacacacaacggaggggaaatgtttgttgccttaaatcaaaaggggattcctgtaagaggaaaaaaaacgaagaaagaacaaaaaacagcccactttcttcctatggcaataacttaattgcatatggtatataaagaacccagttccagcagggagatttctttaagtggactgttttctttcttctcaaaattttctttccttttattttttagtaatcaagaaaggctggaaaaactactgaaaaactgatcaagctggacttgtgcatttatgtttgttttaagacactgcattaaagaaagatttgaaaagtatacacaaaaatcagatttagtaactaaaggttgtaaaaaattgtaaaactggttgtacaatcatgatgttagtaacagtaatttttttcttaaattaatttacccttaagagtatgttagatttgattatctgataatgattatttaaatattcctatctgcttataaaatggctgctataataataataatacagatgttgttatataaggtatatcagacctacaggcttctggcaggatttgtcagataatcaagccacactaactatggaaaatgagcagcattttaaatgctttctagtgaaaaattataatctacttaaactctaatcagaaaaaaaattctcaaaaaaactattatgaaagtcaataaaatagataatttaacaaaagtacaggattagaacatgcttatacctataaataagaacaaaatttctaatgctgctcaagtggaaagggtattgctaaaaggatgtttccaaaaatcttgtatataagatagcaacagtgattgatgataatactgtacttcatcttacttgccacaaaataacattttataaatcctcaaagtaaaattgagaaatctttaagtttttttcaagtaacataatctatctttgtataattcatatttgggaatatggcttttaataatgttcttcccacaaataatcatgcttttttcctatggttacagcattaaactctattttaagttgtttttgaactttattgttttgttatttaagtttatgttatttataaaaaaaaaaccttaataagctgtatctgtttcatatgcttttaattttaaaggaataacaaaactgtctggctcaacggcaagtttccctcccttttctgactgacactaagtctagcacacagcacttgggccagcaaatcctggaagcagacaaaaataagagcctgaagcaatgcttacaatagatgtctcacacagaacaatacaaatatgtaaaaactctttcaccacatattcttgccaattaattggatcatataagtaaaatcattacaaatataagtatttacaggattttaaagttagaatatatttgaatgcatgggtagaaaatatcatattttaaaactatgtatatttaaatttagtaattttctaatctctagaaatctctgctgttcaaaaggtggcagcactgaaagttgttttcctgttagatggcaagagcacaatgcccaaaatagaagatgcagttaagaataaggggccctgaatgtcatgaaggcttgaggtcagcctacagataacaggattattacaaggatgaatttccacttcaaaagtctttcattggcagatcttggtagcactttatatgttcaccaatgggaggtcaatatttatctaatttaaaaggtatgctaaccactgtggttttaatttcaaaatatttgtcattcaagtccctttacataaatagtatttggtaatacatttatagatgagagttatatgaaaaggctaggtcaacaaaaacaatagattcatttaattttcctgtggttgacctatacgaccaggatgtagaaaactagaaagaactgcccttcctcagatatactcttgggagagagcatgaatggtattctgaactatcacctgattcaaggactttgctagctaggttttgaggtcaggcttcagtaactgtagtcttgtgagcatattgagggcagaggaggacttagtttttcatatgtgtttccttagtgcctagcagactatctgttcataatcagttttcagtgtgaattcactgaatgtttatagacaaaagaaaatacacactaaaactaatcttcattttaaaagggtaaaacatgactatacagaaatttaaatagaaatagtgtatatacatataaaatacaagctatgttaggaccaaatgctctttgtctatggagttatacttccatcaaattacatagcaatgctgaattaggcaaaaccaacatttagtggtaaatccattcctggtagtataagtcacctaaaaaagacttctagaaatatgtactttaattatttgtttttctcctatttttaaatttattatgcaaattttagaaaataaaatttgctctagttacacacctttagaattctagaatattaaaactgtaaggggcctccatccctcttactcatttgtagtctaggaaattgagattttgatacacctaaggtcacgcagctgggtagatatacagctgtcacaagagtctagatcagttagcacatgctttctactcttcgattattagtattattagctaatggtctttggcatgtttttgttttttatttctgttgagatatagcctttacatttgtacacaaatgtgactatgtcttggcaatgcacttcatacacaatgactaatctatactgtgatgatttgactcaaaaggagaaaagaaattatgtagttttcaattctgattcctattcaccttttgtttatgaatggaaagctttgtgcaaaatatacatataagcagagtaagccttttaaaaatgttctttgaaagataaaattaaatacatgagtttctaacaattaga

SEQ ID NO: 28965 - DNA, 2328 bp, Homo Sapiens
agggggagcccaggagaccagaacatgaactccttcaattataccacccctgattatgggcactatgatgacaaggataccctggacctcaacacccctgtggataaaacttctaacacgctgcgtgttccagacatcctggccttggtcatctttgcagtcgtcttcctggtgggagtgctgggcaatgccctggtggtctgggtgacggcattcgaggccaagcggaccatcaatgccatctggttcctcaacttggcggtagccgacttcctctcctgcctggcgctgcccatcttgttcacgtccattgtacagcatcaccactggccctttggcggggccgcctgcagcatcctgccctccctcatcctgctcaacatgtacgccagcatcctgctcctggccaccatcagcgccgaccgctttctgctggtgtttaaacccatctggtgccagaacttccgaggggccggcttggcctggatcgcctgtgccgtggcttggggtttagccctgctgctgaccataccctccttcctgtaccgggtggtccgggaggagtactttccaccaaaggtgttgtgtggcgtggactacagccacgacaaacggcgggagcgagccgtggccatcgtccggctggtcctgggcttcctgtggcctctactcacgctcacgatttgttacactttcatcctgctccggacgtggagccgcagggccacgcggtccaccaagacactcaaggtggtggtggcagtggtggccagtttctttatcttctggttgccctaccaggtgacggggataatgatgtccttcctggagccatcgtcacccaccttcctgctgctgaataagctggactccctgtgtgtctcctttgcctacatcaactgctgcatcaaccccatcatctacgtggtggccggccagggcttccagggccgactgcggaaatccctccccagcctcctccggaacgtgttgactgaagagtccgtggttagggagagcaagtcattcacgcgctccacagtggacactatggcccagaagacccaggcagtgtaggcgacagcctcatgggccactgtggcccgatgtccccttccttcccggccattctccctcttgttttcacttcacttttcgtgggatggtgttaccttagctaactaactctcctccatgttgcctgtctttcccagacttgtccctccttttccagcgggactcttctcatccttcctcatttgcaaggtgaacacttccttctagggagcaccctcccaccccccacccccccccacacaccatctttccatcccaggcttttgaaaaacaaacagaaacccgtgtatctgggatatttccatatggcaataggtgtgaacagggaactcagaatacagacaagtagaaagattctcgcttaaaaaaatgtatttattttatggcaagttggaaaatatgtaactggaatctcaaaagttctttgggacaaaacagaagtccatggagttatctaagctcttgtaagtgagttaatttaaaaaagaaaattaggctgagagcagtggctcacgcctgtaatcccagaactttgggaggctaaggtgggtggatcacctgaggtcaagagttccagaccaggctggccagcatggtgaaaccccgtctgtactaaaaatacaaaaaattaactgggcatggtagtgggtgcctgtaatcccagctacttgggaggctgaggtgggagaattgctcgaaccttggaggtggaggttgtggtgagccatgatcgcaccactgcactctagcctgggtgaccgagggaggctctgtctcaaaagcaaagcaaaaacaaaaacaaaaacacctaaaaaacctgcagttttgtttgtactttgtttttaaattatgctttctattttgagatcattgcaaactcaacacaattgtaagtaatgatacagagggatcttgtgtacccttcacccagcctcccccaatggcaacatcttgcaaaactacaatgtagtctcataaccaggatattgacattgatacagtgaagatacaggacattctcatcaccacagggatccccaggatgcccacttccctccacccccacaccccagccgtgtccctaacccctggcaaccaggaatccactctccatttctataatgttgtcatttcaagaatgttattcaatggaatcatatagtatgtaacctgttttgagcttaaaaaaaaaagtatacatgactttaatgaggaaaataaaaatgaatattgaaaaaaaaaactttagag

SEQ ID NO: 28966 - DNA, 2884 bp, Homo Sapiens
ggaagatgggtctctaccgcgtccgcgtgtccaccgggtcctcgttctgcgcgggctccaataaccaggtgcacctgtggctggtcggcgagcacggggaggcggcgctcgggtgggccgtgcggccggcgagggggaaggaggtggaattccaggtggacgtgtccgagtacctggggcggctgctgttcgtgaaattgcgcaaacggcacctcctctcggatgatgcgtggttctgcaactggatctccgtgcagggccccggggccagtgggaacgagttcaggttcccgtgctatcgctgggtggagggcgatggcatcctgagcctgcccgagggcaccggtcgcactgtggtcgatgaccctcaaggtctgttcaagaaacacagggaagaggagctggcagagagaaggaagctgtaccggtggggtaactggaaggacgggttaattctgaatatagctggggccacaataaatgaccttcctgtagatgagagatttctagaggacaaaagaattgactttgaggcctcactgaccaaggggctggcagacctagccatcaaagactctttaaacattctgacttgctggaaaagtctggatgacttcaacaggattttctggtgtggccagagcaagctggctgagcgggtgcgggattcctggaaggaggatgccttatttgggtaccagtttctcaacggcaccaaccccatgttgctgagacgctccgttcgccttcctgcccgcctggagtttcctccagggatgggggagctgcaggccgagctggagaaggagctccagcaaggcacgctatttgaagctgacttctccttgctgatggggatcaaggccaacgtcatcctgtgtacccagcagtatgtggctgcccctctggttatgctgaaactgcagcccgatgggaaactcttacccatggccatccagctccaactgccacacaaggggtccccaccaccaccgcttttcctgcccacggatcccccgatgacctggctcctggccaaatgctgggtccggagctctgacttccagcttcacgagctgcactctcatctcctgaggggacacttggtggctgaggtcatcgctgtggccaccatgaggtgccttccgtctatacatcctatgttcaagcttctcattccgcacctgcgatacaccatggaaattaacatccgggccaggactgggctggtctctgactcgggagtcttcgaccaggtggtgagcacaggtgggggcggccatgtggagctgctccagcgagcaggagcctttctaacctatagctccttctgtccccctgatgacctggctgaccgggggctcctgggagtcaagtcttctttctatgcccaagatgccctgaggctctgggaaattctctctcgctacgtggaggggattgtgagtctccactataagacggacgagtctgtgagagacgacattgagctgcaggcctggtgtcgagatatcactgagattgggctgctgggtgcccaggaccgagggtttcccgtcaccctacagtccaaggaccagctttgccactttgtgaccatgtgtatcttcacctgcactggtcagcactcctccactcacctgggccagctggactggtactcttgggtccctaacgcaccctgcacaatgcggctgcccccaccgaccaccaaggatgtgacactggagaaagtgatggcaacactgccgaacttccatcaggcttctctccagatgtccatcacttggcaactgggcagacgccagcccatcatggtggctctgggtcagcatgaggaagagtacttctcaggccctgagcccaaggctgtgctaaagaagttcagggaggagctggctgccctggaaaaagacatagagatccggaatgcccagctggactggccctacgaatacctgcggcccagcctggtggaaaacagcgtggccatatgagcacccccagccgtgggttgtttcagccctcttcctccaaccccatcctcttcccaacttccatcttctcccaaatcacctttccactgtccacacccactgtaaacaaatctgactttagatacaccacctagggaagtcattccatttcttcctctccgcccccgtccttcctccttgatcattcagatctcccattgagcaggtaatagccacatttatacaaacagtttcaagaatagaatagggtataatacatattactctatacctttagaatcaagtatgactttgaacctaaattgagtttaatgacaagaaaaatggcattttagactaaggaaagaaaagaatttagtccaaactcctaaatcaagggcttccccggtggctcagtggtaaagaatccaccggcaatgcaggagatgcaggtttgatccctgggtgaggaagatcccctggaggagggcatggtaacctactccagtagtcttgcctggagaatcccatggacagagcctggagggctatggtccattgggtcacaaagagttggacgcaactgtagtgactaaacatgcacacacacatcctaagtcaaatactggcagaagaatatacagcataactttctaactgggtgggattcaccacgtgtcctgaaacagacacaacacgaagcaattaacattaacacagcagttctcacaattttcatttcatgactcactcagttagaaaatgatcaatggaaggaaactggttaaacgacagaaactgctctcagttggaggtatctggcctcagtgtttttcccaaaggatccttatctgtaacccatttgcacttcatcagttgagaagcaccaaataaaaatgattagctgg

SEQ ID NO: 28967 - DNA, 3598 bp, Homo Sapiens
cgcttcggtagcataagtgcggtgggagggggctctgcggttttggggacccagggcgggaacccggacccggctggaagtccggagcctgccgcagccccgcccctccgctctttcttggtgaccttaagccagtggctgcctttttctgagcccgggcggggccgaaggcgcccgtaggccctcgggactcccagcactgcagagggtgtgaggtctgacatccaagacacgttgtttcgtatttctgaaggaagaactcaagctccgggaagtgatggctggggatggggcgggcaacttggggaccgagtgtacgatccacgcctaaggttgagggcggccgagctagccaggcagccgtgaccccagtgcttttcagacgtttcttagcttccagagcccaacacatacagctgatacacgcagaccagatctggtcaggtcctcggaagctgagtccagagcgatgctgctgaagacagtgctcttgctgggacatgtggcccaggtgctgatgctggacaatgggctcctgcagacaccacccatgggctggctggcctgggaacgcttccgctgcaacattaactgtgatgaggacccaaagaactgcataagtgaacagctcttcatggagatggctgaccggatggcacaggatggatggcgggacatgggctacacatacctaaacattgatgactgctggatcggcggtcgcgatgccagtggccgcctgatgccagatcccaagcgcttccctcatggcattcctttcctggctgactacgttcactccctgggcctgaagttgggtatctacgcggacatgggcaacttcacctgcatgggttacccaggcaccacactggacaaggtggtccaggatgctcagaccttcgccgagtggaaggtagacatgctcaagctggatggctgcttctccacccccgaggagcgggcccaggggtaccccaagatggctgctgccctgaatgccacaggccgccccatcgccttctcctgcagctggccagcctatgaaggcggcctccccccaagggtgaactacagtctgctggcggacatctgcaacctctggcgtaactatgatgacatccaggactcctggtggagcgtgctctccatcctgaattggttcgtggagcaccaggacatactgcagccagtggccggccctgggcactggaatgaccctgacatgctgctcattgggaactttggtctcagcttagagcaatcccgggcccagatggccctgtggacggtgctggcagcccccctcttgatgtccacagacctgcgtaccatctccgcccagaacatggacattctgcagaatccactcatgatcaaaatcaaccaggatcccttaggcatccagggacgcaggattcacaaggaaaaatctctcatcgaagtgtacatgcggcctctgtccaacaaggctagcgccttagtcttcttcagctgcaggaccgatatgccttatcgctaccactcctcccttggccagctgaacttcaccgggtctgtgatatatgaggcccaggacgtctactcaggtgacatcatcagtggcctccgagatgaaaccaacttcacagtgatcatcaacccttcaggggtagtgatgtggtacctgtatcccatcaagaacctggagatgtcccagcagtgaggagctgggacatgtgacaggctgtggtggcaccactgagcctagaccatggagccttggcatgcccagggcaagtggggaggttctctgctccccaggcctgctcggtgactgaccccatcatacccaaagtgcaatctcacggccaggttctatgccctgtccaagcgtaaaccctcttggaaacttcttttggggcaattttcctgtggccttcctggcctctacttccatgtgcgcagccccacagacgttgctgagcaactcgccagcctcctgagctccatgcccatcaggactctagcctctgaccttgctgttgactctgaaatcaggatttggaagttttcgaattaggagtagagagatctgacctcttgccaggaatgcccatggatcatgtgattggcttttctacccatagagggccttgcagcctgataccactgggagtgagggtcacaaaggagaccttggctccctcaggtcaccaataaacctgttctttaatcaagtagttgtaatatggacctggggtacctttagttagggactctggtggcactacacggggtgctggattcaaatctcacctctatggatgatgtctggcatcgtctggcccctccttttccaaagtgaccagaagattgtacttcctagagatgccagacttgcctcacacccaggagctgcccctgctgtgcctggtatgctggcagtggtgatggtgacaacacaatgaggccaagtagcaatgctcccaggtcctgcagcttgtgctctgcccagcagtcccctggccagcacctcagcctgctcttctctctggtggctccaccccaacccctacttcttttcctttatttctctcccaacctggctgcaaaggaggttcatatccccagatgtgtccacaaacctgtccaggagttgtgtcttaaaattgatttcctgtccctcttcctaaggacaggggtaacagtcaaagtgaaggaatgatgggttcttgcctgtcttgctttggtccgtatttcccaagccctcctcttttagccaaggctacagggcacttgtcttccctggtggctctcccctttggagagagctagtggcagagaacctagctaggtctccttgggctttgaatgcaggagcacccagtgccccaggccttgcactgtgctgcccaaggagtattttctgggtggatctcccatactcctcagggttctgaggtccttgtatttagggtatggtgtaaaaacttacatatgcacattttgttacatcatttaagatgattgaagctttactggttaagtacagggtcaccagagaaagttcctttccccagttgatgtcttgaggctgttgagaaacttaggacagaagcctacctcatcccaggcctgcccctccgtgcatagctctgcctttgggtcttgttcatagtgctgttcaggcaaaatggaatagtctcaggagggaacaccttctcttgctagctccaggaaggctttgtgggaaatgagttgagaccatggacttgggagttgggggccagagttgagcctggacttgaccaattaattcccttacctttcagcccaagatagctacatgtctttacttgctgtataagttttccttttgtcctgggggtgcctgattgatcctatctcttcacccttcattctttcaacaaacatgccatctatctcccaggacatttattcccttctattcaaggccagttaggaatgcaattattttttttttcagttaaatacagacttgtttggacgcaaggtaccctttctctttttaaaaactttttatcatgaaaactttcaaatacaaaaataaaatggtagagagtgaacctccatg

SEQ ID NO: 28968 - DNA, 1890 bp, Homo Sapiens
gggagctggctaccagcgttgagttgccctgtaaagccaaaccccctaaaggtctccacactgctgtttaacggcacacttgacaatggcttcagcagcacgcttgacaatgatgtgggaggaggtcacatgccctatctgcctggaccccttcgtggagcctgtgagcatcgagtgtggccacagcttctgccaggaatgcatctctcaggttgggaaaggtgggggcagcgtctgtgctgtgtgccggcagcgctttctgctcaagaatctccggcccaatcgacagctagccaacatggtgaacaaccttaaagaaatcagccaggaggccagagagggcacacagggggaacggtgtgcagtgcatggagagagacttcacctgttctgtgagaaagatgggaaggccctttgctgggtatgtgcccagtctcggaaacaccgtgaccacgccatggtccctcttgaggaggctgcacaggagtaccaggagaagctccaggtggcattaggggaactgagaagaaagcaggagttggctgagaagttggaagtggaaattgcaataaagagagcagactggaagaaaacagtggaaacacagaaatctaggattcacgcagagtttgtgcagcaaaaaaacttcctggttgaagaagaacagaggcagctgcaggagctggagaaggatgagagggagcagctgagaatcctgggggagaaagaggccaagctggcccagcagagccaggccctacaggagctcatctcagagctagatcgaaggtgccacagctcagcactggaactgctgcaggaggtgataattgtcctggaaaggagtgagtcctggaacctgaaggacctggatattacctctccagaactcaggagtgtgtgccatgtgccagggctgaagaagatgctgaggacatgtgcagtccacatcactctggatccagacacagccaatccgtggctgatactttcagaagatcggagacaagtgaggcttggagacacccagcagagcatacctggaaatgaagagagatttgatagttatcctatggtcctgggtgcccagcactttcactctggaaaacattactgggaggtagatgtgacaggaaaggaggcctgggacctgggtgtctgcagagactctgtgcgcaggaaggggcactttttgcttagttccaagagtggcttctggacaatttggttgtggaacaaacaaaaatatgaggctggcacctacccccagactcccctccaccttcaggtgcctccatgccaagttgggattttcctggactatgaggctggcatggtctccttctacaacatcactgaccatggctccctcatctactccttctctgaatgtgcctttacaggacctctgcggcccttcttcagtcctggtttcaatgatggaggaaaaaacacagcccctctaaccctctgtccactgaatattggatcacaaggatccactgactattgatggctttctctggacactgccactctccccattggcaccgcttctcagccacaaaccctgcctcttttccccatgaactctgaaccacctttgtctctgcagaggcatccggatcccagcaagcgagctttagcagggaagtcacttcaccatcaacattcctgccccagatggctttgtgattccctccagtgaagcagcctccttatatttggcccaaactcatcttgatcaaccaaaaacatgtttctgccttctttatgggacttaagttttttttttctcctctccatctctaggatgtcgtctttggtgagatctctattatatcttgtatggtttgcaaaagggcttcctaaaaataaaaaataaaattt

SEQ ID NO: 28969 - DNA, 2134 bp, Homo Sapiens
acccaagccagcactggctcatactgattcattttgatctctgctaataccagagtcctgcgtggcagagccattggcaccagaaattacaagagaacatggccaagcgagttgccattgtgggagctggggtcagcggcctggcctccatcaagtgctgtctggaagaaggactggagcccacctgctttgagaggagcgatgaccttggggggctgtggagattcaccgaacatgttgaagaaggcagagccagtctctacaagtctgtggtttccaacagctgcaaggagatgtcttgttactcagactttccattcccagaagattatccaaactatgtgccaaattctcaattcctggaatatctcaaaatgtatgcaaaccactttgaccttctgaaacacattcaattcaagaccaaagtctgcagtgtaacaaaatgctcagattctgctgtctctggccaatgggaggtggtcactatgcatgaagagaagcaagagtcagccatctttgatgctgtcatggtctgcactggctttcttactaatccttatttgccactggattcctttccaggtattaatgcctttaaaggccagtactttcatagccggcaatataagcatccagatatatttaaggacaagagagtccttgtgattggaatgggaaattctggcacagacattgctgtggaggccagccacctggcggaaaaggtgttcctcagcaccaccggagggggatgggtgatcagccgaatctttgactcgggctacccatgggacatggtgttcatgacacgctttcagaacatgttgagaaattccctcccaaccccaattgtgacttggttgatggagcgaaagataaacaactggctcaatcatgcaaattacggcttaataccagaagacaggactcagctgaaagagtttgtgctaaatgatgagctcccaggacgcatcatcactgggaaagtgttcatcaggccaagcataaaagaggtaaaggaaaactctgtcatatttaacaatacttcaaaggaagagcctattgacatcattgtctttgccactggatacacatttgctttccccttccttgatgagtctgtagtgaaagttgaagatggccaggcctcactgtacaagtatatcttccctgcacatctgcaaaagccaaccctggccattattggcctcatcaaacccttgggctccatgatacctacaggagaaacacaagctcggtgggctgttcgagtcctgaaaggtgtaaataagttaccaccaccaagtgtcatgatagaggaaattaatgcaaggaaagaaaacaagcccagttggtttggcttgtgctactgcaaggctttacaatcagattatatcacatacatagatgaactcctgacctatatcaatgcaaaacccaacctgttctctatgctcctaacggatccacatctggctctgaccgtcttctttggcccatgctcaccataccagttccgcttgactggcccaggaaaatgggaaggagccagaaatgccatcatgacccagtgggaccgaacattcaaggtcatcaaagctcgagttgtacaagagtctccatctccctttgaaagttttcttaaagtctttagctttctggctttgcttgtggctatttttctgattttcctataagtaaaagatctcctaaatggaagatgcacagagtagatttacaatgctccaattcctctcttacagcaatattgccttcacagttataaactgtattcaaatagtaaaggccaccctctcgcttccctggctggccccagggctaccactggtattcctgagcctctcccagctccacttctaatgctagagaatgataactaagacttctgtgcatttgaaggttgttggaaagttacaggttcattttagaaagaaagctgttcttgacagcactctgagccatcatacctctttcccatataaactattttcacagatctcaactaaaaccccttacttcacaaatgattgtgttgtgctgaaatggtgctcttatagtactggcttattaaaagtaaaaaataaacctaaaaattgattgttttaaaaaaaaa

SEQ ID NO: 28970 - DNA, 3541 bp, Homo Sapiens
tccagtttgcttcttggagaacactggacagctgaataaatgcagtatctaaatataaaagaggactgcaatgccatggctttctgtgctaaaatgaggagctccaagaagactgaggtgaacctggaggcccctgagccaggggtggaagtgatcttctatctgtcggacagggagcccctccggctgggcagtggagagtacacagcagaggaactgtgcatcagggctgcacaggcatgccgtatctctcctctttgtcacaacctctttgccctgtatgacgagaacaccaagctctggtatgctccaaatcgcaccatcaccgttgatgacaagatgtccctccggctccactaccggatgaggttctatttcaccaattggcatggaaccaacgacaatgagcagtcagtgtggcgtcattctccaaagaagcagaaaaatggctacgagaaaaaaaagattccagatgcaacccctctccttgatgccagctcactggagtatctgtttgctcagggacagtatgatttggtgaaatgcctggctcctattcgagaccccaagaccgagcaggatggacatgatattgagaacgagtgtctagggatggctgtcctggccatctcacactatgccatgatgaagaagatgcagttgccagaactgcccaaggacatcagctacaagcgatatattccagaaacattgaataagtccatcagacagaggaaccttctcaccaggatgcggataaataatgttttcaaggatttcctaaaggaatttaacaacaagaccatttgtgacagcagcgtgtccacgcatgacctgaaggtgaaatacttggctaccttggaaactttgacaaaacattacggtgctgaaatatttgagacttccatgttactgatttcatcagaaaatgagatgaattggtttcattcgaatgacggtggaaacgttctctactacgaagtgatggtgactgggaatcttggaatccagtggaggcataaaccaaatgttgtttctgttgaaaaggaaaaaaataaactgaagcggaaaaaactggaaaataaagacaagaaggatgaggagaaaaacaagatccgggaagagtggaacaatttttcattcttccctgaaatcactcacattgtaataaaggagtctgtggtcagcattaacaagcaggacaacaagaaaatggaactgaagctctcttcccacgaggaggccttgtcctttgtgtccctggtagatggctacttccggctcacagcagatgcccatcattacctctgcaccgacgtggcccccccgttgatcgtccacaacatacagaatggctgtcatggtccaatctgtacagaatacgccatcaataaattgcggcaagaaggaagcgaggaggggatgtacgtgctgaggtggagctgcaccgactttgacaacatcctcatgaccgtcacctgctttgagaagtctgagcaggtgcagggtgcccagaagcagttcaagaactttcagatcgaggtgcagaagggccgctacagtctgcacggttcggaccgcagcttccccagcttgggagacctcatgagccacctcaagaagcagatcctgcgcacggataacatcagcttcatgctaaaacgctgctgccagcccaagccccgagaaatctccaacctgctggtggctactaagaaagcccaggagtggcagcccgtctaccccatgagccagctgagtttcgatcggatcctcaagaaggatctggtgcagggcgagcaccttgggagaggcacgagaacacacatctattctgggaccctgatggattacaaggatgacgaaggaacttctgaagagaagaagataaaagtgatcctcaaagtcttagaccccagccacagggatatttccctggccttcttcgaggcagccagcatgatgagacaggtctcccacaaacacatcgtgtacctctatggcgtctgtgtccgcgacgtggagaatatcatggtggaagagtttgtggaagggggtcctctggatctcttcatgcaccggaaaagtgatgtccttaccacaccatggaaattcaaagttgccaaacagctggccagtgccctgagctacttggaggataaagacctggtccatggaaatgtgtgtactaaaaacctcctcctggcccgtgagggaatcgacagtgagtgtggcccattcatcaagctcagtgaccccggcatccccattacggtgctgtctaggcaagaatgcattgaacgaatcccatggattgctcctgagtgtgttgaggactccaagaacctgagtgtggctgctgacaagtggagctttggaaccacgctctgggaaatctgctacaatggcgagatccccttgaaagacaagacgctgattgagaaagagagattctatgaaagccggtgcaggccagtgacaccatcatgtaaggagctggctgacctcatgacccgctgcatgaactatgaccccaatcagaggcctttcttccgagccatcatgagagacattaataagcttgaagagcagaatccagatattgtttccagaaaaaaaaaccagccaactgaagtggaccccacacattttgagaagcgcttcctaaagaggatccgtgacttgggagagggccactttgggaaggttgagctctgcaggtatgaccccgaagacaatacaggggagcaggtggctgttaaatctctgaagcctgagagtggaggtaaccacatagctgatctgaaaaaggaaatcgagatcttaaggaacctctatcatgagaacattgtgaagtacaaaggaatctgcacagaagacggaggaaatggtattaagctcatcatggaatttctgccttcgggaagccttaaggaatatcttccaaagaataagaacaaaataaacctcaaacagcagctaaaatatgccgttcagatttgtaaggggatggactatttgggttctcggcaatacgttcaccgggacttggcagcaagaaatgtccttgttgagagtgaacaccaagtgaaaattggagacttcggtttaaccaaagcaattgaaaccgataaggagtattacaccgtcaaggatgaccgggacagccctgtgttttggtatgctccagaatgtttaatgcaatctaaattttatattgcctctgacgtctggtcttttggagtcactctgcatgagctgctgacttactgtgattcagattctagtcccatggctttgttcctgaaaatgataggcccaacccatggccagatgacagtcacaagacttgtgaatacgttaaaagaaggaaaacgcctgccgtgcccacctaactgtccagatgaggtttatcagcttatgagaaaatgctgggaattccaaccatccaatcggacaagctttcagaaccttattgaaggatttgaagcacttttaaaataagaagcatgaataacatttaaattccacagattatcaa

SEQ ID NO: 28971 - DNA, 706 bp, Homo Sapiens
gtctcagcatggcggatgggagcagcgatgcggctagggaacctcgccctgcaccagccccaatcagacgccgctcctccaactaccgcgcttatgccacggagccgcacgccaagaaaaaatctaagatctccgcctcgagaaaattgcagctgaagactctgctgctgcagattgcaaagcaagagctggagcgagaggcggaggagcggcgcggagagaaggggcgcgctctgagcacccgctgccagccgctggagttggccgggctgggcttcgcggagctgcaggacttgtgccgacagctccacgcccgtgtggacaaggtggatgaagagagatacgacatagaggcaaaagtcaccaagaacatcacggagattgcagatctgactcagaagatctttgaccttcgaggcaagtttaagcggcccaccctgcggagagtgaggatctctgcagatgccatgatgcaggcgctgctgggggcccgggctaaggagtccctggacctgcgggcccacctcaagcaggtgaagaaggaggacaccgagaaggaaaaccgggaggtgggagactggcgcaagaacatcgatgcactgagtggaatggagggccgcaagaaaaagtttgagagctgagccttcctgcctactgcccctgccctgaggagggccctgaggaataaagcttctctctgagctga

SEQ ID NO: 28972 - DNA, 3762 bp, Homo Sapiens
cccgcgagcgtccatccatctgtccggccgactgtccagcgaaaggggctccaggccgggcgcacgtcgacccgggggaccgaggccaggagaggggccaagagcgcggctgacccttgcgggccggggcaggggacggtggccgcggccatgcagtcctgtgccagggcgtgggggctgcgcctgggccgcggggtcgggggcggccgccgcctggctgggggatcggggccgtgctgggcgccgcggagccgggacagcagcagtggcggcggggacagcgccgcggctggggcctcgcgcctcctggagcgccttctgcccagacacgacgacttcgctcggaggcacatcggccctggggacaaagaccagagagagatgctgcagaccttggggctggcgagcattgatgaattgatcgagaagacggtccctgccaacatccgtttgaaaagacccttgaaaatggaagaccctgtttgtgaaaatgaaatccttgcaactctgcatgccatttcaagcaaaaaccagatctggagatcgtatattggcatgggctattataactgctcagtgccacagacgattttgcggaacttactggagaactcaggatggatcacccagtatactccataccagcctgaggtgtctcaggggaggctggagagtttactcaactaccagaccatggtgtgtgacatcacaggcctggacatggccaatgcatccctgctggatgaggggactgcagccgcagaggcactgcagctgtgctacagacacaacaagaggaggaaatttctcgttgatccccgttgccacccacagacaatagctgttgtccagactcgagccaaatatactggagtcctcactgagctgaagttaccctgtgaaatggacttcagtggaaaagatgtcagtggagtgttgttccagtacccagacacggaggggaaggtggaagactttacggaactcgtggagagagctcatcagagtgggagcctggcctgctgtgctactgaccttttagctttgtgcatcttgaggccacctggagaatttggggtagacatcgccctgggcagctcccagagatttggagtgccactgggctatgggggaccccatgcagcattttttgctgtccgagaaagcttggtgagaatgatgcctggaagaatggtgggggtaacaagagatgccactgggaaagaagtgtatcgtcttgctcttcaaaccagggagcaacacattcggagagacaaggctaccagcaacatctgtacagctcaggccctcttggcgaatatggctgccatgtttcgaatctaccatggttcccatgggctggagcatattgctaggagggtacataatgccactttgattttgtcagaaggtctcaagcgagcagggcatcaactccagcatgacctgttctttgataccttgaagattcattgtggctgctcagtgaaggaggtcttgggcagggcggctcagcggcagatcaattttcggctttttgaggatggcacacttggtatttctcttgatgaaacagtcaatgaaaaagatctggacgatttgttgtggatctttggttgtgagtcatctgcagaactggttgctgaaagcatgggagaggagtgcagaggtattccagggtctgtgttcaagaggaccagcccgttcctcacccatcaagtgttcaacagctaccactctgaaacaaacattgtccggtacatgaagaaactggaaaataaagacatttcccttgttcacagcatgattccactgggatcctgcaccatgaaactgaacagttcgtctgaactcgcacctatcacatggaaagaatttgcaaacatccacccctttgtgcctctggatcaagctcaaggatatcagcagcttttccgagagcttgagaaggatttgtgtgaactcacaggttatgaccaggtctgtttccagccaaacagcggagcccagggagaatatgctggactggccactatccgagcctacttaaaccagaaaggagaggggcacagaacggtttgcctcattccgaaatcagcacatgggaccaacccagcaagtgcccacatggcaggcatgaagattcagcctgtggaggtggataaatatgggaatatcgatgcagttcacctcaaggccatggtggataagcacaaggagaacctagcagctatcatgattacatacccatccaccaatggggtgtttgaagagaacatcagtgacgtgtgtgacctcatccatcaacatggaggacaggtctacctagacggggcaaatatgaatgctcaggtgggaatctgtcgccctggagacttcgggtctgatgtctcgcacctaaatcttcacaagaccttctgcattccccacggaggaggtggtcctggcatggggcccatcggagtgaagaaacatctcgccccgtttttgcccaatcatcccgtcatttcactaaagcggaatgaggatgcctgtcctgtgggaaccgtcagtgcggccccatggggctccagttccatcttgcccatttcctgggcttatatcaagatgatgggaggcaagggtcttaaacaagccacggaaactgcgatattaaatgccaactacatggccaagcgattagaaacacactacagaattcttttcaggggtgcaagaggttatgtgggtcatgaatttattttggacacgagacccttcaaaaagtctgcaaatattgaggctgtggatgtggccaagagactccaggattatggatttcacgcccctaccatgtcctggcctgtggcagggaccctcatggtggagcccactgagtcggaggacaaggcagagctggacagattctgtgatgccatgatcagcattcggcaggaaattgctgacattgaggagggccgcatcgaccccagggtcaatccgctgaagatgtctccacactccctgacctgcgttacatcttcccactgggaccggccttattccagagaggtggcagcattcccactccccttcatgaaaccagagaacaaattctggccaacgattgcccggattgatgacatatatggagatcagcacctggtttgtacctgcccacccatggaagtttatgagtctccattttctgaacaaaagagggcgtcttcttagtcctctctccctaagtttaaaggactgatttgatgcctctccccagagcatttgataagcaagaaagatttcatctcccaccccagcctcaagtaggagttttatatactgtgtatatctctgtaatctctgtcaaggtaaatgtaaatacagtagctggagggagtcgaagctgatggttggaagacggatttgctttggtattctgcttccacatgtgccagttgcctggattgggagccattttgtgttttgcgtagaaagttttaggaactttaacttttaatgtggcaagtttgcagatgtcatagaggctatcctggagacttaatagacatttttttgttccaaaagagtccatgtggactgtgccatctgtgggaaatcccagggcaaatgtttacattttgtataccctgaagaactctttttcctctaatatgcctaatctgtaatcacatttctgagtgttttcctctttttctgtgtgaggttttttttttttttaatctgcatttattagtattctaataaaagcattttgatcgg

SEQ ID NO: 28973 - DNA, 7576 bp, Homo Sapiens
gtctaggagccagccccacccttagaaaagatgttttccatgaggatcgtctgcctagttctaagtgtggtgggcacagcatgggtatggcccttttcattttttcttcttgctttctctctggtgtttattccacaaagagcctggaggtcagagtctacctgctctatgtcctgacacactcttagctttatgaccccaggcctgggaggaaatttcctgggtgggcttgacacctcaagaatacagggtaatatgacaccaagaggaagatcttagatggatgagagtgtacaactacaagggaaactttagcatctgtcattcagtcttaccacattttgttttgttttgttttaaaaagggcaagaattatttgccatccttgtacctataaagccttggtgcattataatgctagttaatggaataaaacattttatggtaagatttgttttctttagttattaatttcttgctacttgtccataataagcagaacttttagtgttagtacagttttgctgaaaggttattgttgtgtttgtcaagacagaagaaaaagcaaacgaattatctttggaaatatctttgcagtatcagaagagattagttagtaaggcaatacgcttttccgcagtaatggtattcttttaaattatgaatccatctctaaaggttacatagaaacttgaaggagagaggaacattcagttaagatagtctaggtttttctactgaagcagcaattacaggagaaagagctctacagtagttttcaactttctgtctgcagtcattagtaaaaatgaaaaggtaaaatttaactgattttatagattcaaataattttccttttaggatggattctttaaaactcctaatatttatcaaatgcttatttaagtgtcacacacagttaagaaatttgtacaccttgtctcctttaattctcataacaactccataaaatgggtcctaggatttccatttgaagataagaaacctgaagcttgccgaagccctgtgtctgctctccttaatctctgtgagagtgccatctcttcctggggacttgtaggcatgccactgtctcctcttctggctaacattgctgttgctctcttttgtgtatgtgaatgaatctttaaagactgcagatagtggtgaaggtgactttctagctgaaggaggaggcgtgcgtggcccaagggttgtggaaagacatcaatctgcctgcaaagattcagactggcccttctgctctgatgaagactgggtaagcagtcagcgggggaagcaggagattccttccctctgatgctagaggggctcacaggctgacctgattggtcccagaaacttttttaaatagaaaataattgaatagttacctacatagcaaataaagaaaaggaacctactcccaagagcactgtttatttacctccccaactctggatcattagtgggtgaacagacaggatttcagttgcatgctcaggcaaaaccaggctcctgagtattgtggcctcaatttcctggcacctatttatggctaagtggaccctcattccagagtttctctgcgacctctaactagtcctcttacctacttttaagccaacttatctggaagagaaagggtaggaagaaatgggggctgcatggaaacatgcaaaattattctgaatctgagagatagatccttactgtaattttctcccttcactttcagaactacaaatgcccttctggctgcaggatgaaagggttgattgatgaagtcaatcaagattttacaaacagaataaataagctcaaaaattcactatttgaatatcagaagaacaataaggattctcattcgttgaccactaatataatggaaattttgagaggcgatttttcctcagccaatagtaagtattacatatttacttctttgactttataacagaaacaacaaaaatcctaaataaatatgatatccgcttatatctatgacaatttcatcccaaagtacttagtgtagaaacacataccttcataatatccctgaaaattttaagagggagcttttgttttcgttattttttcaaagtaaaagatgttaactgagattgtttaaggtcacaaaataagtcagaattttggattaaaacaagaatttaaatgtgttcttttcaacagtatatactgaaagtaggatgggtcagactctttgagttgatatttttgtttctgctttgtaaaggtgaaaactgagaggtcaaggaacttgttcaaagacacagagctgggaattcaactcccagactccactgagctgattaggtagatttttaaatttaaaatatagggtcaagctacgtcattctcacagtctactcattagggttaggaaacattgcattcactctgggcatggacagcgagtctagggagtcctcagtttctcaagttttgctttgcctttttacaccttcacaaacacttgacatttaaaatcagtgatgccaacactagctggcaagtgagtgatcctgttgacccaaaacagcttaggaaccatttcaaatctatagagttaaaaagaaaagctcatcagtaagaaaatccaatatgttcaagtcccttgattaaggatgttataaaataattgaaatgcaatcaaaccaactattttaactccaaattacacctttaaaattccaaagaaagttcttcttctatatttctttgggattactaattgctattaggacatcttaactggcattcatggaaggctgcagggcataacattatccaaaagtcaaatgccccataggttttgaactcacagattaaactgtaaccaaaataaaattaggcatatttacaagctagtttctttctttcttttttctctttctttctttctttctttctttctttctttctttctttctttctttctttctccttccttcctttcttcctttcttttttgctggcaattacagacaaatcactcagcagctacttcaataaccatattttcgatttcagaccgtgataatacctacaaccgagtgtcagaggatctgagaagcagaattgaagtcctgaagcgcaaagtcatagaaaaagtacagcatatccagcttctgcagaaaaatgttagagctcagttggttgatatgaaacgactggaggtaagtatgtggctgtggtcccgagtgtccttgtttttgagtagagggaaaaggaaggcgatagttatgcactgagtgtctactatatgcagagaaaagtgttatatccatcatctacctaaaagtaggtattattttcctcactccacagttgaagaaaaaaaaattcagagatattaagtaaattttccaacgtacatagatagtaattcaaagcaatgttcagtccctgtctattccaagccattacatcaccacacctctgagccctcagcctgagttcaccaaggatcatttaattagcgtttcctttgagagggaatagcaccttactcttgatccattctgaggctaagatgaattaaacagcatccattgcttatcctggctagccctgcaatacccaacatctcttccactgagggtgctcgataggcagaaaacagagaatattaagtggtaggtctccgagtcaaaaaaaatgaaaccagtttccagaaggaaaattaactaccaggaactcaatagacgtagtttatgtatttgtatctacattttctctttatttttctcccctctctctaggtggacattgatattaagatccgatcttgtcgagggtcatgcagtagggctttagctcgtgaagtagatctgaaggactatgaagatcagcagaagcaacttgaacaggtcattgccaaagacttacttccctctagagataggcaacacttaccactgataaaaatgaaaccagttccagacttggttcccggaaattttaagagccagcttcagaaggtacccccagagtggaaggcattaacagacatgccgcagatgagaatggagttagagagacctggtggaaatgagattactcgaggaggctccacctcttatggaaccggatcagagacggaaagccccaggaaccctagcagtgctggaagctggaactctgggagctctggacctggaagtactggaaaccgaaaccctgggagctctgggactggagggactgcaacctggaaacctgggagctctggacctggaagtactggaagctggaactctgggagctctggaactggaagtactggaaaccaaaaccctgggagccctagacctggtagtaccggaacctggaatcctggcagctctgaacgcggaagtgctgggcactggacctctgagagctctgtatctggtagtactggacaatggcactctgaatctggaagttttaggccagatagcccaggctctgggaacgcgaggcctaacaacccagactggggcacatttgaagaggtgtcaggaaatgtaagtccagggacaaggagagagtaccacacagaaaaactggtcacttctaaaggagataaagagctcaggactggtaaagagaaggtcacctctggtagcacaaccaccacgcgtcgttcatgctctaaaaccgttactaagactgttattggtcctgatggtcacaaagaagttaccaaagaagtggtgacctccgaagatggttctgactgtcccgaggcaatggatttaggcacattgtctggcataggtactctggatgggttccgccataggcaccctgatgaagctgccttcttcgacactgcctcaactggaaaaacattcccaggtttcttctcacctatgttaggagagtttgtcagtgagactgagtctaggggctcagaatctggcatcttcacaaatacaaaggaatccagttctcatcaccctgggatagctgaattcccttcccgtggtaaatcttcaagttacagcaaacaatttactagtagcacgagttacaacagaggagactccacatttgaaagcaagagctataaaatggcagatgaggccggaagtgaagccgatcatgaaggaacacatagcaccaagagaggccatgctaaatctcgccctgtcagaggtatccacacttctcctttggggaagccttccctgtccccctagactaagttaaatatttctgcacagtgttcccatggccccttgcatttccttcttaactctctgttacacgtcattgaaactacacttttttggtctgtttttgtgctagactgtaagttccttgggggcagggcctttgtctgtctcatctctgtattcccaaatgcctaacagtacagagccatgactcaataaatacatgttaaatggatgaatgaattcctctgaaactctatttgagcttatttagtcaaattctttcactattcaaagtgtgtgctattagaattgtcacccaactgattaatcacatttttagtatgtgtctcagttgacatttaggtcaggctaaatacaagttgtgttagtattaagtgatgcttagctacctgtactggttacttgctattagtttgtgcaagtaaaattccaaatacatttgaggaaaatcccctttgcaatttgtaggtataaataaccgcttatttgcataagttctatcccactgtaagtgcatcctttccctatggagggaaggaaaggaggaagaaagaaaggaagggaaagaaacagtatttgccttatttaatctgagccgtgcctatctttgtaaagttaaatgagaataacttcttccaaccagcttaattttttttttagactgtgatgatgtcctccaaacacatccttcaggtacccaaagtggcattttcaatatcaagctaccgggatccagtaagattttttctgtttattgcgatcaagagaccagtttgggaggatggcttttgatccagcaaagaatggatggatcactgaattttaaccggacctggcaagactacaagagaggtttcggcagcctgaatgacgagggggaaggagaattctggctaggcaatgactacctccacttactaacccaaaggggctctgttcttagggttgaattagaggactgggctgggaatgaagcttatgcagaatatcacttccgggtaggctctgaggctgaaggctatgccctccaagtctcctcctatgaaggcactgcgggtgatgctctgattgagggttccgtagaggaaggggcagagtacacctctcacaacaacatgcagttcagcacctttgacagggatgcagaccagtgggaagagaactgtgcagaagtctatgggggaggctggtggtataataactgccaagcagccaatctcaatggaatctactaccctgggggctcctatgacccaaggaataacagtccttatgagattgagaatggagtggtctgggtttcctttagaggggcagattattccctcagggctgttcgcatgaaaattaggccccttgtgacccaataggctgaagaagtgggaatgggagcactctgtcttctttgctagagaagtggagagaaaatacaaaaggtaaagcagttgagattctctacaacctaaaaaattcctaggtgctattttcttatcctttgtactgtagctaaatgtacctgagacatattagtctttgaaaaataaagttatgtaaggttttttttatctttaaatagctctgtgggttttaacatttttgtaaagatataccaagggccattcagtacatcaggaaagtggcagacagaagcttctctctgcaaccttgaagactattggtttgagaacttctcttcccataccacccaaaatcataatgccattggaaagcaaaaagttgttttatccatttgatttgaattgttttaagccaatattttaaggtaaaactcactgaatctaaccatagctgacctttgtagtagaatttacaacttataattacaatgcacaatttataattacaatatgtatttatgtcttttgctatggagcaaatccaggaaggcaagagaaacattctttcctaaatataaatgaaaatctatcctttaaactcttccactagacgttgtaatgcacacttatttttttcccaaggagtaaccaatttctttctaaaacacatttaaaattttaaaactatttatgaatattaaaaaaagacataattcacacattaataaacaatctcccaagtattgatttaacttcatttttctaataatcataaactatattctgtgacatgctaattattattaaatgtaagtcgttagttcgaaagcctctcactaagtatgatctatgctatattcaaaattcaacccatttactttggtcaatatttgatctaagttgcatctttaatcctggtggtcttgccttctgatttttaatttgtatccttttctattaagatatatttgtcattttctcttgaatatgtattaaaatatcccaagc

SEQ ID NO: 28974 - DNA, 2798 bp, Homo Sapiens
gccctctcccacagcggagtccaaaacaggcctaccagtcagttcttatttctattgggtgtttccatgctccaccatgttaagagctaagaatcagctttttttactttcacctcattacctgaggcaggtaaaagaatcatcaggctccaggctcatacagcaacgacttctacaccagcaacagccccttcacccagaatgggctgccctggctaaaaagcagctgaaaggcaaaaacccagaagacctaatatggcacaccccggaagggatctctataaaacccttgtattccaagagagatactatggacttacctgaagaacttccaggagtgaagccattcacacgtggaccatatcctaccatgtatacctttaggccctggaccatccgccagtatgctggttttagtactgtggaagaaagcaataagttctataaggacaacattaaggctggtcagcagggattatcagttgcctttgatctggcgacacatcgtggctatgattcagacaaccctcgagttcgtggtgatgttggaatggctggagttgctattgacactgtggaagataccaaaattctttttgatggaattcctttagaaaaaatgtcagtttccatgactatgaatggagcagttattccagttcttgcaaattttatagtaactggagaagaacaaggtgtacctaaagagaaacttactggtaccatccaaaatgatatactaaaggaatttatggttcgaaatacatacatttttcctccagaaccatccatgaaaattattgctgacatatttgaatatacagcaaagcacatgccaaaatttaattcaatttcaattagtggataccatatgcaggaagcaggggctgatgccattctggagctggcctatactttagcagatggattggagtactctagaactggactccaggctggcctgacaattgatgaatttgcaccaaggttgtctttcttctggggaattggaatgaatttctatatggaaatagcaaagatgagagctggtagaagactctgggctcacttaatagagaaaatgtttcagcctaaaaactcaaaatctcttcttctaagagcacactgtcagacatctggatggtcacttactgagcaggatccctacaataatattgtccgtactgcaatagaagcaatggcagcagtatttggagggactcagtctttgcacacaaattcttttgatgaagctttgggtttgccaactgtgaaaagtgctcgaattgccaggaacacacaaatcatcattcaagaagaatctgggattcccaaagtggctgatccttggggaggttcttacatgatggaatgtctcacaaatgatgtttatgatgctgctttaaagctcattaatgaaattgaagaaatgggtggaatggccaaagctgtagctgagggaatacctaaacttcgaattgaagaatgtgctgcccgaagacaagctagaatagattctggttctgaagtaattgttggagtaaataagtaccagttggaaaaagaagacgctgtagaagttctggcaattgataatacttcagtgcgaaacaggcagattgaaaaacttaagaagatcaaatccagcagggatcaagctttggctgaacattgtcttgctgcactaaccgaatgtgctgctagcggagatggaaatatcctggctcttgcagtggatgcatctcgggcaagatgtacagtgggagaaatcacagatgccctgaaaaaggtatttggtgaacataaagcgaatgatcgaatggtgagtggagcatatcgccaggaatttggagaaagtaaagagataacatctgctatcaagagggttcataaattcatggaacgtgaaggtcgcagacctcgtcttcttgtagcaaaaatgggacaagatggccatgacagaggagcaaaagttattgctacaggatttgctgatcttggttttgatgtggacataggccctcttttccagactcctcgtgaagtggcccagcaggctgtggatgcggatgtgcatgctgtgggcgtaagcaccctcgctgctggtcataaaaccctagttcctgaactcatcaaagaacttaactcccttggacggccagatattcttgtcatgtgtggaggggtgataccacctcaggattatgaatttctgtttgaagttggtgtttccaatgtatttggtcctgggactcgaattccaaaggctgccgttcaggtgcttgatgatattgagaagtgtttggaaaagaagcagcaatctgtataatatcctctttttgttttagcttttgtctaaaatattattttagttatgatcaaagaagagagtaaagctatgtcttcaatttaatttcaatacctgatttgtactttccttgaaagctttactttaaaataccttacttataggcctggtgtcatgctataagtatgtacatacagtttcacttcaaaaataaaaaaaaatccctaaaaactctctatactctctataacaatactttatcaagaactctggacaatggtattatttttaaaaatcatggtgatgtatttattagaatgtttcttataaatctctttcatttttatattaagaattaaactgtacctaaaaaaactctgactattcccatttctcagtttagcattacattgtcttgagcaccagaaaataaaatccatatattaattaaaacctatcttgaaaaaaaaaaaaaaaaaaaaaaaaaaaa

SEQ ID NO: 28975 - DNA, 2798 bp, Homo Sapiens; identical to SEQ ID NO: 28974

SEQ ID NO: 28976 - DNA, 2411 bp, Homo Sapiens
gcgttctcgggaagctgctgccgtagctgccgccgccgctaccaccgcgttcgggtgtagaatttggaatccctgcgccgcgttaacaatgaagcagagttcgaacgtgccggctttcctcagcaagctgtggacgcttgtggaggaaacccacactaacgagttcatcacctggagccagaatggccaaagttttctggtcttggatgagcaacgatttgcaaaagaaattcttcccaaatatttcaagcacaataatatggcaagctttgtgaggcaactgaatatgtatggtttccgtaaagtagtacatatcgactctggaattgtaaagcaagaaagagatggtcctgtagaatttcagcatccttacttcaaacaaggacaggatgacttgttggagaacattaaaaggaaggtttcatcttcaaaaccagaagaaaataaaattcgtcaggaagatttaacaaaaattataagtagtgctcagaaggttcagataaaacaggaaactattgagtccaggctttctgaattaaaaagtgagaatgagtccctttggaaggaggtgtcagaattacgagcaaagcatgcacaacagcaacaagttattcgaaagattgtccagtttattgttacattggttcaaaataaccaacttgtgagtttaaaacgtaaaaggcctctacttctaaacactaatggagcccaaaagaagaacctgtttcagcacatagtcaaagaaccaactgataatcatcatcataaagttccacacagtaggactgaaggtttaaagccaagggagaggatttcagatgacatcattatttatgatgttactgatgataatgcagatgaagaaaatatcccagttattccagaaactaatgaggatgttatatctgatccctccaactgtagccagtaccctgatattgtcatcgttgaagatgacaatgaagatgagtatgcacctgtcattcagagtggagagcagaatgaaccagccagagaatccctaagttcaggcagtgatggcagcagccctctcatgtctagtgctgtccagctaaatggctcatccagtctgacctcagaagatccagtgaccatgatggattccattttgaatgataacatcaatcttttgggaaaggttgagctgttggattatcttgacagtattgactgcagtttagaggacttccaggccatgctatcaggaagacaatttagcatagacccagatctcctggttgatcttttcactagttctgtgcagatgaatcccacagattacatcaataatacaaaatctgagaataaaggattagaaactaccaagaacaatgtagttcagccagtttcggaagagggaagaaaatctaaatccaaaccagataagcagcttatccagtataccgcctttccacttcttgcattcctcgatgggaaccctgcttcttctgttgaacaggcgagtacaacagcatcatcagaagttttgtcctctgtagataaacccatagaagttgatgagcttctggatagcagcctagacccagaaccaacccaaagtaagcttgttcgcctggagccattgactgaagctgaagctagtgaagctacactgttttatttatgtgaacttgctcctgcacctctggatagtgatatgccacttttagatagctaaatccccaggaagtggactttacatgtatatattcatcaaaatgatgaactatttattttaaagtatcatttggtactttttttgtaaattgctttgttttgtttaatcagatactgtggaataaaagcaccttttgcttttctcactaaccacacactcttgcagagctttcaggtgttactcagctgcatagttacgcagatgtaatgcacattattggcgtatctttaagttggattcaaatggccatttttctccaattttggtaaattggatatcttttttttacaaatacgaccattaacctcagttaaatttttgtttgttttcctgtttgatgctgtctatttgcattgagtgtaagtcatttgaactaatggtataactcctaaagcttctctgctccagttatttttattaaatatttttcacttggcttatttttaaaactgggaacataaagtgcctgtatcttgtaaaacttcatttgtttcttttggttcagagaagttcatttatgttcaaagacgtttattcatgttcaacaggaaagacaaagtgtacgtgaatgctcgctgtctgatagggttccagctccatatatatagaaagatcgggggtgggatgggatggagtgagccccatccagttagttggactagttttaaataaaggttttccggtttgtgtttttttgaaccatactgtttag

SEQ ID NO: 28977 - DNA, 2534 bp, Homo Sapiens
gacgcttctggggagtgagggaagcggtttacgagtgacttggctggagcctcaggggcgggcactggcacggaacacaccctgaggccagccctggctgcccaggcggagctgcctcttctcccgcgggttggtggacccgctcagtacggagttggggaagctctttcacttcggaggattgctcaacaaccatgctgggcatctggaccctcctacctctggttcttacgtctgttgctagattatcgtccaaaagtgttaatgcccaagtgactgacatcaactccaagggattggaattgaggaagactgttactacagttgagactcagaacttggaaggcctgcatcatgatggccaattctgccataagccctgtcctccaggtgaaaggaaagctagggactgcacagtcaatggggatgaaccagactgcgtgccctgccaagaagggaaggagtacacagacaaagcccatttttcttccaaatgcagaagatgtagattgtgtgatgaaggacatggcttagaagtggaaataaactgcacccggacccagaataccaagtgcagatgtaaaccaaactttttttgtaactctactgtatgtgaacactgtgacccttgcaccaaatgtgaacatggaatcatcaaggaatgcacactcaccagcaacaccaagtgcaaagaggaaggatccagatctaacttggggtggctttgtcttcttcttttgccaattccactaattgtttgggtgaagagaaaggaagtacagaaaacatgcagaaagcacagaaaggaaaaccaaggttctcatgaatctccaaccttaaatcctgaaacagtggcaataaatttatctgatgttgacttgagtaaatatatcaccactattgctggagtcatgacactaagtcaagttaaaggctttgttcgaaagaatggtgtcaatgaagccaaaatagatgagatcaagaatgacaatgtccaagacacagcagaacagaaagttcaactgcttcgtaattggcatcaacttcatggaaagaaagaagcgtatgacacattgattaaagatctcaaaaaagccaatctttgtactcttgcagagaaaattcagactatcatcctcaaggacattactagtgactcagaaaattcaaacttcagaaatgaaatccaaagcttggtctagagtgaaaaacaacaaattcagttctgagtatatgcaattagtgtttgaaaagattcttaatagctggctgtaaatactgcttggttttttactgggtacattttatcatttattagcgctgaagagccaacatatttgtagatttttaatatctcatgattctgcctccaaggatgtttaaaatctagttgggaaaacaaacttcatcaagagtaaatgcagtggcatgctaagtacccaaataggagtgtatgcagaggatgaaagattaagattatgctctggcatctaacatatgattctgtagtatgaatgtaatcagtgtatgttagtacaaatgtctatccacaggctaaccccactctatgaatcaatagaagaagctatgaccttttgctgaaatatcagttactgaacaggcaggccactttgcctctaaattacctctgataattctagagattttaccatatttctaaactttgtttataactctgagaagatcatatttatgtaaagtatatgtatttgagtgcagaatttaaataaggctctacctcaaagacctttgcacagtttattggtgtcatattatacaatatttcaattgtgaattcacatagaaaacattaaattataatgtttgactattatatatgtgtatgcattttactggctcaaaactacctacttctttctcaggcatcaaaagcattttgagcaggagagtattactagagctttgccacctctccatttttgccttggtgctcatcttaatggcctaatgcacccccaaacatggaaatatcaccaaaaaatacttaatagtccaccaaaaggcaagactgcccttagaaattctagcctggtttggagatactaactgctctcagagaaagtagctttgtgacatgtcatgaacccatgtttgcaatcaaagatgataaaatagattcttatttttcccccacccccgaaaatgttcaataatgtcccatgtaaaacctgctacaaatggcagcttatacatagcaatggtaaaatcatcatctggatttaggaattgctcttgtcataccctcaagtttctaagatttaagattctccttactactatcctacgtttaaatatctttgaaagtttgtattaaatgtgaattttaagaaataatatttatatttctgtaaatgtaaactgtgaagatagttataaactgaagcagatacctggaaccacctaaagaacttccatttatggaggatttttttgccccttgtgtttggaattataaaatataggtaaaagtacgtaattaaataatgtttttg

SEQ ID NO: 28978 - DNA, 924 bp, Homo Sapiens
cctgacgacccggcgacggcgacgtctcttttgactaaaagacagtgtccagtgctccagcctaggagtctacggggaccgcctcccgcgccgccaccatgcccaacttctctggcaactggaaaatcatccgatcggaaaacttcgaggaattgctcaaagtgctgggggtgaatgtgatgctgaggaagattgctgtggctgcagcgtccaagccagcagtggagatcaaacaggagggagacactttctacatcaaaacctccaccaccgtgcgcaccacagagattaacttcaaggttggggaggagtttgaggagcagactgtggatgggaggccctgtaagagcctggtgaaatgggagagtgagaataaaatggtctgtgagcagaagctcctgaagggagagggccccaagacctcgtggaccagagaactgaccaacgatggggaactgatcctgaccatgacggcggatgacgttgtgtgcaccagggtctacgtccgagagtgagtggccacaggtagaaccgcggccgaagcccaccactggccatgctcaccgccctgcttcactgccccctccgtcccaccccctccttctaggatagcgctccccttaccccagtcacttctgggggtcactgggatgcctcttgcagggtcttgctttctttgacctcttctctcctcccctacaccaacaaagaggaatggctgcaagagcccagatcacccattccgggttcactccccgcctccccaagtcagcagtcctagccccaaaccagcccagagcagggtctctctaaaggggacttgagggcctgagcaggaaagactggccctctagcttctaccctttgtccctgtagcctatacagtttagaatatttatttgttaattttattaaaatgcttta

SEQ ID NO: 28979 - DNA, 2780 bp, Homo Sapiens
cgttgctgtcgctctgcacgcacctatgtggaaactaaagcccagagagaaagtctgacttgccccacagccagtgagtgactgcagcagcaccagaatctggtctgtttcctgtttggctcttctaccactacggcttgggatctcgggcatggtggctttgccaatggtccttgttttgctgctggtcctgagcagaggtgagagtgaattggacgccaagatcccatccacaggggatgccacagaatggcggaatcctcacctgtccatgctggggtcctgccagccagccccctcctgccagaagtgcatcctctcacaccccagctgtgcatggtgcaagcaactgaacttcaccgcgtcgggagaggcggaggcgcggcgctgcgcccgacgagaggagctgctggctcgaggctgcccgctggaggagctggaggagccccgcggccagcaggaggtgctgcaggaccagccgctcagccagggcgcccgcggagagggtgccacccagctggcgccgcagcgggtccgggtcacgctgcggcctggggagccccagcagctccaggtccgcttccttcgtgctgagggatacccggtggacctgtactaccttatggacctgagctactccatgaaggacgacctggaacgcgtgcgccagctcgggcacgctctgctggtccggctgcaggaagtcacccattctgtgcgcattggttttggttcctttgtggacaaaacggtgctgccctttgtgagcacagtaccctccaaactgcgccacccctgccccacccggctggagcgctgccagtcaccattcagctttcaccatgtgctgtccctgacgggggacgcacaagccttcgagcgggaggtggggcgccagagtgtgtccggcaatctggactcgcctgaaggtggcttcgatgccattctgcaggctgcactctgccaggagcagattggctggagaaatgtgtcccggctgctggtgttcacttcagacgacacattccatacagctggggacgggaagttgggcggcattttcatgcccagtgatgggcactgccacttggacagcaatggcctctacagtcgcagcacagagtttgactacccttctgtgggtcaggtagcccaggccctctctgcagcaaatatccagcccatctttgctgtcaccagtgccgcactgcctgtctaccaggagctgagtaaactgattcctaagtctgcagttggggagctgagtgaggactccagcaacgtggtacagctcatcatggatgcttataatagcctgtcttccaccgtgacccttgaacactcttcactccctcctggggtccacatttcttacgaatcccagtgtgagggtcctgagaagagggagggtaaggctgaggatcgaggacagtgcaaccacgtccgaatcaaccagacggtgactttctgggtttctctccaagccacccactgcctcccagagccccatctcctgaggctccgggcccttggcttctcagaggagctgattgtggagttgcacacgctgtgtgactgtaattgcagtgacacccagccccaggctccccactgcagtgatggccagggacacctacaatgtggtgtatgcagctgtgcccctggccgcctaggtcggctctgtgagtgctctgtggcagagctgtcctccccagacctggaatctgggtgccgggctcccaatggcacagggcccctgtgcagtggaaagggtcactgtcaatgtggacgctgcagctgcagtggacagagctctgggcatctgtgcgagtgtgacgatgccagctgtgagcgacatgagggcatcctctgcggaggctttggtcgctgccaatgtggagtatgtcactgtcatgccaaccgcacgggcagagcatgcgaatgcagtggggacatggacagttgcatcagtcccgagggagggctctgcagtgggcatggacgctgcaaatgcaaccgctgccagtgcttggacggctactatggtgctctatgcgaccaatgcccaggctgcaagacaccatgcgagagacaccgggactgtgcagagtgtggggccttcaggactggcccactggccaccaactgcagtacagcttgtgcccataccaatgtgaccctggccttggcccctatcttggatgatggctggtgcaaagagcggaccctggacaaccagctgttcttcttcttggtggaggatgacgccagaggcacggtcgtgctcagagtgagaccccaagaaaagggagcagaccacacgcaggccattgtgctgggctgcgtagggggcatcgtggcagtggggctggggctggtcctggcttaccggctctcggtggaaatctatgaccgccgggaatacagtcgctttgagaaggagcagcaacaactcaactggaagcaggacagtaatcctctctacaaaagtgccatcacgaccaccatcaatcctcgctttcaagaggcagacagtcccactctctgaaggagggagggacacttacccaaggctcttctccttggaggacagtgggaactggagggtgagaggaagggtgggtctgtaagaccttggtaggggactaattcactggcgaggtgcggccaccaccctacttcattttcagagtgacacccaagagggctgcttcccatgcctgcaaccttgcatccatctgggctaccccacccaagtatacaataaagtcttacctcag

SEQ ID NO: 28980 - DNA, 3643 bp, Homo Sapiens
cctgcgtgtccctctgcgctccgactggtgcgacttctccctgcgctagcgaggcagggttttggcctcgcctctcgcgagatcgcctcctgttgctgccgccgccgctcctggccactgactggcggcgcctgcgcagccgccatgttcggttgctatgctgcggcctaggagagggggtgtgcttgagggaggaggaagagatagaggaggaggagggggaggaagaggaggtggagaaggaggggggtgactgagctcctcttgcactctcacacacaaacgctgcccaggattacccgccagctcacgccgcgcagtgcgcttttccgctcctcgcgccccaccaccaacattgttctctcaggactcctgggtcccaggggtcggaattgggcctgagcgggagaggaaagagacttggctttggccgcggggtcggaggattggggccaggccccctcccccacgcacttttgggggtgtggattatctcatccctgcagggaggtaggagaggtcgccggctgcccgcctccctgccacctccccagcggcgccggcccgcggctgcccagcagcatgaggtggtgctggcggctccgggtcgtggcgcgaccgctgcggcggcggctgctcggggggcgctgaggtagccccccggagcggcacggaggacgcgcttctcctctgcgcgccggggcctcgaggctttttttctccagccgagaggacgcggctgtgatatacgaagactttgtgtggacagtaatgacctcacgtttccgattgcctgctggcagaacctacaatgtacgagcatcagagttggcccgagacagacagcatactgaagtggtttgcaacatccttcttctggataacactgtacaagctttcaaagtcaataaacatgatcaggggcaagtcttgttggatgtcgtcttcaagcatctagatttgactgagcaggactattttggtttacagttggctgatgattccacagataacccaaggtggctggatccaaacaaaccaataaggaagcagctaaagagaggatctccttacagtttgaactttagagtcaaattttttgtaagtgaccccaacaagttacaagaagaatatacaaggtaccagtattttttgcaaattaaacaagacattcttactggaagattaccctgtccttctaatactgctgcccttttagcttcatttgctgttcagtctgaacttggagactacgatcagtcagagaacttgtcaggctacctctcagattattctttcattcctaatcaacctcaagattttgaaaaagaaattgcaaaattacatcagcaacacataggcttatctcctgcagaagcagaatttaattacctaaacacagcacgtaccttagaactctatggagttgaattccactatgcaagggatcagagtaacaatgaaattatgattggagtgatgtcaggaggaattctgatttataagaacagggtacgaatgaatacctttccatggttgaagattgtaaaaatttcttttaagtgcaaacagttttttattcaacttagaaaagaattgcatgaatctagagaaacattattgggatttaatatggtgaattacagagcatgtaaaaatttgtggaaagcatgtgtagaacatcacacattcttccgtttggacagaccacttccacctcaaaagaatttttttgcacattattttacattaggttcaaaattccggtactgtgggagaactgaagtccaatcagttcagtatggcaaagaaaaggcaaataaagacagggtatttgcaagatccccaagtaagcccttggcacggaaattaatggattgggaagtagtaagcagaaattcaatatctgatgacaggttagaaacacaaagtcttccatcacgatctccaccgggaactcctaatcatcgaaattctacattcacgcaggaaggaacccggttacgaccatcttcagttggtcatttggtagaccatatggttcatacttccccaagcgaagtgtttgtaaatcagagatctccgtcatcaacacaagctaatagcattgttctggaatcatcaccatcacaagagacccctggagatgggaagcctccagctttaccacccaaacagtcaaagaaaaacagttggaaccaaattcattattcacattcgcaacaagatctagaaagtcatattaatgaaacatttgatattccatcttctcctgaaaaacccactcctaatggtggtattccacatgataatcttgtcctaatcagaatgaaacctgatgaaaatgggaggtttggattcaatgtaaagggaggatatgatcagaagatgcctgtgattgtgtctcgagtagcaccaggaacacctgctgacctctgtgtccctagactgaatgaaggggaccaagttgtactgatcaatggtcgggacattgcagaacacactcatgatcaggttgtgctgtttattaaagctagttgtgagagacattctggggaactcatgcttctagttcgacctaatgctgtatatgatgtagtggaagaaaagctagaaaatgagccagatttccagtatattcctgagaaagccccactagatagtgtgcatcaggatgaccattccctgcgggagtcaatgatccagctagctgaggggcttatcactggaacagtcctgacacagtttgatcaactgtatcggaaaaaacctggaatgacaatgtcctgtgccaaattacctcagaatatttccaaaaatagatacagagatatttcgccttatgatgccacacgggtcattttaaaaggtaatgaagactacatcaatgcgaactatataaatatggaaattccttcttccagcattataaatcagtacattgcttgtcaagggccattaccacacacttgtacagatttttggcagatgacttgggaacaaggctcctctatggttgtaatgttgaccacacaagttgaacgtggcagagttaaatgtcaccaatattggccagaacccacaggcagttcatcttatggatgctaccaagttacctgccactctgaagaaggaaacactgcctatatcttcaggaagatgaccctatttaaccaagagaaaaatgaaagtcgtccactcactcagatccagtacatagcctggcctgaccatggagtccctgatgattcgagtgactttctagattttgtttgtcatgtacgaaacaagagggctggcaaggaagaacccgttgttgtccattgcagtgctggaatcggaagaactggggttcttattactatggaaacagccatgtgtctcattgaatgcaatcagccagtttatccactagatattgtaagaacaatgagagatcagcgagccatgatgatccaaacacctagtcaatacagatttgtatgtgaagctattttgaaagtttatgaagaaggctttgttaaacccttaacaacatcaacaaataaataagaaagcaaaaagatctgggatatgtgttggaaaactgctttcccttatgttcactgtgccataatgctgctcgcaggaaatggcattttac

SEQ ID NO: 28981 - DNA, 3879 bp, Homo Sapiens
ggcacgaggccagccgaatccaagccgtgtgtactgcgtgctcagcactgcccgacagtcctagctaaacttcgccaactccgctgcctttgccgccaccatgcccaaaacgatcagtgtgcgtgtgaccaccatggatgcagagctggagtttgccatccagcccaacaccaccgggaagcagctatttgaccaggtggtgaaaactattggcttgagggaagtttggttctttggtctgcagtaccaggacactaaaggtttctccacctggctgaaactcaataagaaggtgactgcccaggatgtgcggaaggaaagccccctgctctttaagttccgtgccaagttctaccctgaggatgtgtccgaggaattgattcaggacatcactcagcgcctgttctttctgcaagtgaaagagggcattctcaatgatgatatttactgcccgcctgagaccgctgtgctgctggcctcgtatgctgtccagtctaagtatggcgacttcaataaggaagtgcataagtctggctacctggccggagacaagttgctcccgcagagagtcctggaacagcacaaactcaacaaggaccagtgggaggagcggatccaggtgtggcatgaggaacaccgtggcatgctcagggaggatgctgtcctggaatatctgaagattgctcaagatctggagatgtatggtgtgaactacttcagcatcaagaacaagaaaggctcagagctgtggctgggggtggatgccctgggtctcaacatctatgagcagaatgacagactaactcccaagataggcttcccctggagtgaaatcaggaacatctctttcaatgataagaaatttgtcatcaagcccattgacaaaaaagccccggacttcgtcttctatgctccccggctgcggattaacaagcggatcttggccttgtgcatggggaaccatgaactatacatgcgccgtcgcaagcctgataccattgaggtgcagcagatgaaggcacaggcccgggaggagaagcaccagaagcagatggagcgtgctatgctggaaaatgagaagaagaagcgtgaaatggcagagaaggagaaagagaagattgaacgggagaaggaggagctgatggagaggctgaagcagatcgaggaacagactaagaaggctcagcaagaactggaagaacagacccgtagggctctggaacttgagcaggaacggaagcgtgcccagagcgaggctgaaaagctggccaaggagcgtcaagaagctgaagaggccaaggaggccttgctgcaggcctcccgggaccagaaaaagactcaggaacagctggccttggaaatggcagagctgacagctcgaatctcccagctggagatggcccgacagaagaaggagagtgaggctgtggagtggcagcagaaggcccagatggtacaggaagacttggagaagacccgtgctgagctgaagactgccatgagtacacctcatgtggcagagcctgctgagaatgagcaggatgagcaggatgagaatggggcagaggctagtgctgacctacgggctgatgctatggccaaggaccgcagtgaggaggaacgtaccactgaggcagagaagaatgagcgtgtgcagaagcacctgaaggccctcacttcggagctggccaatgccagagatgagtccaagaagactgccaatgacatgatccatgctgagaacatgcgactgggccgagacaaatacaagaccctgcgccagatccggcagggcaacaccaagcagcgcattgacgaatttgagtctatgtaatgggcacccagcctctagggacccctcctccctttttccttgtccccacactcctacacctaactcacctaactcatactgtgctggagccactaactagagcagccctggagtcatgccaagcatttaatgtagccatgggaccaaacctagccccttagcccccacccacttccctgggcaaatgaatggctcactatggtgccaatggaacctcctttctcttctctgttccattgaatctgtatggctagaatatcctacttctccagcctagaggtactttccacttgattttgcaaatgcccttacacttactgttgtcctatgggagtcaagtgtggagtaggttggaagctagctcccctcctctcccctccactgtcttcttcaggtcctgagattacacggtggagtgtatgcggtctaggaatgagacaggacctagatatcttctccagggatgtcaactgacctaaaatttgccctcccatcccgtttagagttatttaggctttgtaacgattgggggaataaaaagatgttcagtcatttttgtttctacctcccagatcggatctgttgcaaactcagcctcaataagccttgtcgttgactttagggactcaatttctccccagggtggatgggggaaatggtgccttcaagaccttcaccaaacatactagaagggcattggccattctattgtggcaaggctgagtagaagatcctaccccaattccttgtaggagtataggccggtctaaagtgagctctatgggcagatctaccccttacttattattccagatctgcagtcacttcgtgggatctgcccctccctgcttcaatacccaaatcctctccagctataacagtagggatgagtacccaaaagctcagccagccccatcaggactcttgtgaaaagagaggatatgttcacacctagcgtcagtattttccctgctaggggttttaggtctcttcccctctcagagctacttgggccatagctcctgctccacagccatcccagccttggcatctagagcttgatgccagtaggctcaactagggagtgagtgcaaaaagctgagtatggtgagagaagcctgtgccctgatccaagtttactcaaccctctcaggtgaccaaaatccccttctcatcactcccctcaaagaggtgactgggccctgcctctgtttgacaaacctctaacccaggtcttgacaccagctgttctgtcccttggagctgtaaaccagagagctgctgggggattctggcctagtcccttccacacccccaccccttgctctcaacccaggagcatccacctccttctctgtctcatgtgtgctcttcttctttctacagtattatgtactctactgatatctaaatattgatttctgccttccttgctaatgcaccattagaagatattagtcttggggcaggatgattttggcctcattactttaccacccccacacctggaaagcatatactatattacaaaatgacattttgccaaaattattaatataagaagctttcagtattagtgatgtcatctgtcactataggtcatacaatccattcttaaagtacttgttatttgtttttattattactgtttgtcttctccccagggttcagtccctcaaggggccatcctgtcccaccatgcagtgccccctagcttagagcctccctcaattccccctggccaccaccccccactctgtgcctgaccttgaggagtcttgtgtgcattgctgtgaattagctcacttggtgatatgtcctatattggctaaattgaaacctggaattgtggggcaatctattaatagctgccttaaagtcagtaacttacccttagggaggctgggggaaaaggttagattttgtattcaggggttttttgtgtactttttgggtttttaaaaaattgtttttggaggggtttatgctcaatccatgttctatttcagtgccaataaaatttaggtgacttcaaaaaaaaaaaa

SEQ ID NO: 28982 - DNA, 7596 bp, Homo Sapiens
gtggtcgcggctggggacgtgcgcccgcgccaccatcttcggctgaagaggcaattgcttttggatcgttccatttacaatggcgcagagaactggactcgaggatccagagaggtatctctttgtggacagggctgtcatctacaaccctgccactcaagctgattggacagctaaaaagctagtgtggattccatcagaacgccatggttttgaggcagctagtatcaaagaagaacggggagatgaagttatggtggagttggcagagaatggaaagaaagcaatggtcaacaaagatgatattcagaagatgaacccacctaagttttccaaggtggaggatatggcagaattgacatgcttgaatgaagcttccgttttacataatctgaaggatcgctactattcaggactaatctatacttattctggactcttctgtgtagttataaacccttacaagaatcttccaatttactctgagaatattattgaaatgtacagagggaagaagcgtcatgagatgcctccacacatctatgctatatctgaatctgcttacagatgcatgcttcaagatcgtgaggaccagtcaattctttgcacgggtgagtcaggtgctgggaagacagaaaatacaaagaaagttattcagtaccttgcccatgttgcttcttcacataaaggaagaaaggaccataatattcctggggaacttgaacggcagcttttgcaagcaaatccaattctcgaatcatttggaaatgcgaagactgtgaaaaatgataactcatctcgttttggcaaatttattcggatcaactttgatgtaactggctatatcgttggggccaacattgaaacataccttctggaaaagtctcgtgctgttcgtcaagcaaaagatgaacgtacttttcatatcttttaccagttgttatctggagcaggagaacacctaaagtctgatttgcttcttgaaggatttaataactacaggtttctctccaatggctatattcctattccgggacagcaagacaaagataatttccaggagaccatggaagcaatgcacataatgggcttctcccatgaagagattctgtcaatgcttaaagtagtatcttcagtgctacagtttggaaatatttctttcaaaaaggagagaaatactgatcaagcttccatgccagaaaatacagttgcgcagaagctctgccatcttcttgggatgaatgtgatggagtttactcgggccatcctgactccccggatcaaggtcggccgagactatgtgcaaaaagcccagaccaaagaacaggcagattttgcagtagaagcattggcaaaagctacctatgagcggctctttcgctggctcgttcatcgcatcaataaagctctggataggaccaaacgtcagggagcatctttcattggaatcctggatattgctggatttgaaatttttgagctgaactcctttgaacaactttgcatcaactacaccaatgagaagctgcagcagctgttcaaccacaccatgtttatcctagaacaagaggaataccagcgcgaaggcatcgagtggaacttcatcgatttcgggctggatctgcagccatgcatcgacctaatagagagacctgcgaaccctcctggtgtactggcccttttggatgaagaatgctggttccctaaagccacagataaaacctttgttgaaaaactggttcaagagcaaggttcccactccaagtttcagaaacctcgacaattaaaagacaaagctgatttttgcattatacattatgcagggaaggtggactataaggcagatgagtggctgatgaagaatatggaccccctgaatgacaacgtggccacccttttgcaccagtcatcagacagatttgtggcagagctttggaaagatgtggaccgtatcgtgggtctggatcaagtcactggtatgactgagacagcttttggctccgcatataaaaccaagaagggcatgtttcgtaccgttgggcaactctacaaagaatctctcaccaagctgatggcaactctccgaaacaccaaccctaactttgttcgttgtatcattccaaatcacgagaagagggctggaaaattggatccacacctagtcctagatcagcttcgctgtaatggtgtcctggaagggatccgaatctgtcgccagggcttccctaaccgaatagttttccaggaattcagacagagatatgagatcctaactccaaatgctattcctaaaggttttatggatggtaaacaggcctgtgaacgaatgatccgggctttagaattggacccaaacttgtacagaattggacagagcaagatatttttcagagctggagttctggcacacttagaggaagaaagagatttaaaaatcaccgatatcattatcttcttccaggccgtttgcagaggttgcctggccagaaaggcctttgccaagaagcagcagcaactaagtgccttaaaggtcttgcagcggaactgtgccgcgtacctgaaattacggcactggcagtggtggcgagtcttcacaaaggtgaagccgcttctacaagtgactcgccaggaggaagaacttcaggccaaagatgaagagctgttgaaggtgaaggagaagcagacaaaggtggaaggagagctggaggagatggagcggaagcaccagcagcttttagaagagaagaatatccttgcagaacaactacaagcagagactgagctctttgctgaagcagaagagatgagggcaagacttgctgctaaaaagcaggaattagaagagattctacatgacttggagtctagggttgaagaagaagaagaaagaaaccaaatcctccaaaatgaaaagaaaaaaatgcaagcacatattcaggacctggaagaacagctagacgaggaggaaggggctcggcaaaagctgcagctggaaaaggtgacagcagaggccaagatcaagaagatggaagaggagattctgcttctcgaggaccaaaattccaagttcatcaaagaaaagaaactcatggaagatcgcattgctgagtgttcctctcagctggctgaagaggaagaaaaggcgaaaaacttggccaaaatcaggaataagcaagaagtgatgatctcagatttagaagaacgcttaaagaaggaagaaaagactcgtcaggaactggaaaaggccaaaagaaaactcgacggggagacgaccgacctgcaggaccagatcgcagagctgcaggcgcagattgatgagctcaagctgcagctggccaagaaggaggaggagctgcagggcgcactggccagaggtgatgatgaaacactccataagaacaatgcccttaaagttgtgcgagagctacaagcccaaattgctgaacttcaggaagactttgaatccgagaaggcttcacggaacaaggccgaaaagcagaaaagggacttgagtgaggaactggaagctctgaaaacagagctggaggacacgctggacaccacggcagcccagcaggaactacgtacaaaacgtgaacaagaagtggcagagctgaagaaagctcttgaggaggaaactaagaaccatgaagctcaaatccaggacatgagacaaagacacgcaacagccctggaggagctctcagagcagctggaacaggccaagcggttcaaagcaaatctagagaagaacaagcagggcctggagacagataacaaggagctggcgtgtgaggtgaaggtcctgcagcaggtcaaggctgagtctgagcacaagaggaagaagctcgacgcgcaggtccaggagctccatgccaaggtctctgaaggcgacaggctcagggtggagctggcggagaaagcaagtaagctgcagaatgagctagataatgtctccacccttctggaagaagcagagaagaagggtattaaatttgctaaggatgcagctagtcttgagtctcaactacaggatacacaggagcttcttcaggaggagacacgccagaaactaaacctgagcagtcggatccggcagctggaagaggagaagaacagtcttcaggagcagcaggaggaggaggaggaggccaggaagaacctggagaagcaagtgctggccctgcagtcccagttggctgataccaagaagaaagtagatgacgacctgggaacaattgaaagtctggaagaagccaagaagaagcttctgaaggacgcggaggccctgagccagcgcctggaggagaaggcactggcgtatgacaaactggagaagaccaagaaccgcctgcagcaggagctggacgacctcacggtggacctggaccaccagcgccaggtcgcctccaacttggagaagaagcagaagaagtttgaccagctgttagcagaagagaagagcatctctgctcgctatgccgaagagcgggaccgggccgaagccgaggccagagagaaagaaaccaaagccctgtcactggcccgggccctcgaggaagccctggaggccaaggaggagtttgagaggcagaacaagcagctccgagcagacatggaagacctcatgagctccaaagatgatgtgggaaaaaacgttcacgaacttgaaaaatccaaacgggccctagagcagcaggtggaggaaatgaggacccagctggaggagctggaagacgaactccaggccacggaagatgccaagcttcgtctggaggtcaacatgcaggccatgaaggcgcagttcgagagagacctgcaaaccagggatgagcagaatgaagagaagaagcggctgctgatcaaacaggtgcgggagctcgaggcggagctggaggatgagaggaaacagcgggcgcttgctgtagcttcgaagaaaaagatggagatagacctgaaggacctcgaagcccaaatcgaggctgcgaacaaagctcgggatgaggtgattaagcagctccgcaagctccaggctcagatgaaggattaccaacgtgaattagaagaagctcgtgcatccagagatgagatttttgctcaatccaaagagagtgaaaagaaattgaagagtctggaagcagaaatccttcaattgcaggaggaacttgcctcatctgagcgagcccgccgacacgccgagcaggagagagatgagctggcggacgagatcaccaacagcgcctctggcaagtccgcgctgctggatgagaagcggcgtctggaagctcggatcgcacagctggaggaggagctggaagaggagcagagcaacatggagctgctcaacgaccgcttccgcaagaccactctacaggtggacacactgaacgccgagctagcagccgagcgcagcgccgcccagaagagtgacaatgcacgccagcaactggagcggcagaacaaggagctgaaggccaagctgcaggaactcgagggtgctgtcaagtctaagttcaaggccaccatctcagccctggaggccaagattgggcagctggaggagcagcttgagcaggaagccaaggaacgagcagccgccaacaaattagtccgtcgcactgagaagaagctgaaagaaatcttcatgcaggttgaggatgagcgtcgacacgcggaccagtataaagagcagatggagaaggccaacgctcggatgaagcagcttaaacgccagctggaggaagcagaagaagaagcgacgcgtgccaacgcatctcggcgtaaactccagcgggaactggatgatgccaccgaggccaacgagggcctgagccgcgaggtcagcaccctgaagaaccggctgaggcggggtggccccatcagcttctcttccagccgatctggccggcgccagctgcaccttgaaggagcttccctggagctctccgacgatgacacagaaagtaagaccagtgatgtcaacgagacgcagccaccccagtcagagtaaagttgcaggaagccagaggaggcaatacagtgggacagttaggaatgcacccggggcctcctgcagatttcggaaattggcaagctacgggattccttcctgaaagatcaactgtgtcttaaggctctccagcctatgcatactgtatcctgcttcagacttaggtacaattgctcccctttttatatacagacacacacaggacacatatattaaacagattgtttcatcattgcatctattttccatatagtcatcaagagaccattttataaaacatggtaagaccctttttaaaacaaactccaggcccttggttgcgggtcgctgggttattggggcagcgccgtggtcgtcactcagtcgctctgcatgctctctgtcatacagacaggtaacctagttctgtgttcacgtggcccccgactcctcagccacatcaagtctcctagaccactgtggactctaaactgcacttgtctctctcatttccttcaaataatgatcaatgctatttcagtgagcaaactgtgaaaggggctttggaaagagtaggaggggtgggctggatcggaagcaacacccatttggggttaccatgtccatcccccaaggggggccctccccctcgagtcgatggtgtcccgcatctactcatgtgaactggccttggcgagggctggtctgtgcatagaagggatagtggccacactgcagctgaggccccaggtggcagccatggatcatgtagacttccagatggtctcccgaaccgcctggctctgccggcgccctcctcacgtcaggagcaagcagccgtggacccctaagccgagctggtggaaggcccctccccgtcgccagccgggccctcatgctgaccttgcaaattcagccgctgctttgagcccaaaatgggaatattggttttgtgtccgaggcttgttccaagtttgtcaatgaggtttatggagcctccagaacagatgccatcttcctgaatgttgacatgccagtgggtgtgactccttcatttttccttctcccttccctttggacagtgttacagtgaacacttagcatcctgtttttggttggtagttaagcaaactgacattacggaaagtgccttagacactacagtactaagacaatgttgaatatatcattcgcctctataacaatttaatgtattcagttttgactgtgcttcatatcatgtacctctctagtcaaagtggtattacagacattcagtgacaatgaatcagtgttaattctaaatccttgatcctctgcaatgtgcttgaaaacacaaaccttttgggttaaaagctttaacatctattaggaagaatttgtcctgtgggtttggaatcttggattttccccctttatgaactgtactggctgttgaccaccagacacctgaccgcaaatatcttttcttgtattcccatatttctagacaatgatttttgtaagacaataaatttattcattatagatatttgcgcctgctctgtttacttgaagaaaaaagcacccgtggagaataaagagacctcaataaacaaaaaaaaaaa

SEQ ID NO: 28983 - DNA, 7596 bp, Homo Sapiens; identical to SEQ ID NO: 28982

SEQ ID NO: 28984 - DNA, 38542 bp, Homo Sapiens
tctagaagctgccatcatactgaaggtaatcttctgaaacttgcggttttctttcaaaaattatgtttataagatgatccatgttcttgcagagtttattcattttatgctgtataatattccattatatccacatacaatgcagtattgacccttcctcctgttgatgggcatttgtcttgtttctagttactttgctattatatcagtgtcaccatgattatccaaaagtaattcttttgtacactctaatttaagaacaactaaccctttttaatgaataaatcaaccttgtattgagttgctactaagtttcagttgactagtacctgggatacacacaggtgcagacatttgactgagacatattgatttttctcatctgcctatttaggctaatcaccagactataaaaccatgagaaccactgccattgagtatagtctgtgtcagtctacactatagctttaactagttgtgtgatttcttgcaaagagcaatcagagaagacacaataaacacatttactgatttcaggctggagagcttttaagcaatagggagatggccacacacaaggtggagaaaattactgtgaaaaggaagtactttctttagagccccacctaagctaggctgcagaaatgtctacaatgggtttgaaaaaactcaaaatgagcctttctgcagtgtgaaaatcctccaagataaagagacagattgatggttcctgccgccgccctgtcctgcccagttgctgatttcaggaaatactttggcaggtttgtgggtcatagagttgccaggtttcttgggatttgtaatagaacatcacaagaaaatcaagtgtgaagcaagagctcaactcttaacaggggtattgtttgtggttttgttactggaaaagatagtgaccttaccagggccaaagtttgtagacacaggaattacgaaatggagaagggggagaagtgagctagtggcagcataaaaagaccagcagatgccccacagcactgctcttccagaggcaagaccaaccaagatgaggtgggtccacagctttccctcctgcctttcctctggttctttatttcagtcttttttgcatacatcggtagagatgcagaaatagaacaaagaaacgggcaaatgggctaaattatagtgaaccaaagggcttagtgtgttaaatcttctccttttctgcatccatagaagacagtgctgctgtctttcccaggagataagatttactctcaggagtgtctttttccttcaggttacatttttgactttatagggtatgtcatcagctcccgtggtaggcttcctggcatcctgagtatatttattagcagatattttcctctttaaaaatgtacaataaggaagactaatagtaacacatttgaatgacacaattaattgactagtacctgggatacacactaatacctgggatacatctaattaaggcacttagatcttataaaaataaacactttttgaaatgttgaaataataagactagaaactttttttttttttgagatggagtctcgctttgtcaccaggctgcagtgcagtggcatgatctcggctcactgcaacctccacctcccaggttcaagtgattctcctgcctcagcctcccaggtagctgggactacaggcgtgcgccactatgcccacctaatttttgtatttttagtagagacgggctttcaccatgttggccaggatgacctcgatctcttgacctcgtgatctgcctgccttggcctcccaaagtgctgggattacaggcatgagccaccgtgtctggcctagaaactattttaatagaagcaagtagtgcccgaatggttggcatttgttagtgagatggtgaactggcagacggcacctgtgggtcaatgcccatggccaccgtcctgcttttggacaccagttctcttccaggtaaccttctggcattttggggtttcagataccatttcctaaaggtgaattattataaaatactagaaatacccacgtgtttaaaattatatatttaaggaaccttttattacggaaaatatcaagaagtagaggaatagcacagtaagcccaaagttcccatctctgagttatctacattttattaccactatctttgcggtgtctgagggaggtttctctttcctggagggctcctgtattattgccaatgtactttcctgaatgcagccagaaactgagcccacccctccacctatgtgcctttctatccctctctgaagcttctgcagaattcccagcaggacagggcttgctggaagcttggtatgctcagaagctgctaaagtgtgtatgggcaggtgtgggggcaatttcttggtcctagcacttccatatatcgactttcttttctggctgctaagtgggaggagtgtgtgtgtatgcatgtgtgtgtgtgtgtgtgtacatgcatgtgtgtgtggatgcatgcatgtgctgtgaagcagggagactagctttccactcctccttgtcttctctctgcagtgccctgggagctgtcattgccctcctgctctggggacagctttttgcagtggactcaggcaatgatgtcacggatatcgcaggtcagtctttggttgggtaggagtgtgcatcccactctgaccctctcgggtctgcactctctctgagaacacccaattcccccttcttatctcgacctctgggctttcaggaccataaagaacattggggttcctgccagaaatgaggggagcttgcctttccattggcttctattcggggtggaaggagattgatgtgcagagcagctcccgctcatctgacttttcacggttcactgggaacaatttccaaatagcaaactctctggcttctctctctttgcagatgacggctgcccgaagccccccgagattgcacatggctatgtggagcactcggttcgctaccagtgtaagaactactacaaactgcgcacagaaggagatggtaagatgtggacaactgtctccatgccctacatacaacccccttctctgacatttccatgatgggtggtgctgaggtgattcgccagaaagttcgttgctctccttggagccaggagatttagattctaataagcgttttgtcgccagtagccatggccctttgggcagactaacttttgtcagcctcaagttttctgttttgttaaggggaggcgatgccatgcagcctacctcatgtaaatctcagagtcagatttacatctccagcagatgtgggaaaagaaggaatgctgatgatgatgtcaccctcacctagtgagtcttgctgtcctggcactgctctaagggctttatacttatttgctcacttagtcctcacagtatccctctgaacagagtttattgttttcactttgctgataaggaaactgaggcacagacaggttgagtatcttgcccaaattcaggcagcctgtaagaggcagagtcaggatttgaaccctgagccctccctgtactgcttggctgtgaccgccatgaccacagtgtgttctgctgggcttaactggtgtccaggcacttggcttccagcacagcactctttcccttcctccttctcatattctctctcctttctcccttcctgtctgcctcctttcttcttcttctttttaattcttctccttaaatgccttctcactctgctctgggtgcagacttgacttttcctttggctcatttcttgccttttgtttcaggagtatacaccttaaatgataagaagcagtggataaataaggctgttggagataaacttcctgaatgtgaagcaggtgggtgctgagcactgagcacttaagagagcaggcaggcgtccagcggggaacgtcctagaggcacagccttccagtgcggcttcctctgagcacacaagagccaggaggagggatgtgggagaaccgcagctggccagggagagacttaagcagttaggtgatgactccctaagggtcaccaagggtcttgttcattggggcctgaagggcactggctgaatccactgtcggcactgcccacagatcaggagagcctgtgcatacagagagcctgctagaaagccctgggtctaaggagaagcaagctccagggagaacaagtcaaggaatgacataaaatcttaatccatggaagcctagcaggaggctggacatgggctggaactcctgcttctcgttattaggaggagctgttgctctctcctttcattctcagaaccagaggcaaagacccagcctcttctgctcttactggtgtggaaatgccaacctgcctcgtattaactgcaccatctacaaaatctgagctccagccagtgctgctctagattcatctttctttagagagaatgaattattgtagcccctagccctttcaatgaatttcagggaattgtggaaattcctttattgggataattgtttaaatataatacagttcgcgagcttctattcggggtggaaggagattgatgtgcagagcagctcccgctcatctgacttttcacggttcactgggaacaatttccaaatagcaaactctctggcttctctctctttgcagatgacggctgcccgaagccccccgagattgcacatggctatgtggagcactcggttcgctaccagtgtaagaactactacaaactgcgcacagaaggagatggtaagatgtggacaactgtctccatgccctacatacaacccccttctctgacatttccatgatgggtggtgctgaggtgattcgccagaaagttcgttgctctccttggagccaggagatttagattctaataagcgttttgtcgccagtagccatggccctttgggcagactaacttttgtcagcctcaagttttctgttttgttaaggggaggcgatgccatgcagcctacctcatgtaaatctcagagtcagatttacatctccagcagatgtgggaaaagaaggaatgctgatgatgatgtcaccctcacctagtgagtcttgctgtcctggcactgctctaagggctttatacttatttgctcacttagtcctcacagtatccctctgaacagagtttattgttttcactttgctgataaggaaactgaggcacagacaggttgagtatcttgcccaaattcaggcagcctgtaagaggcagagtcaggatttgaaccctgagccctccctgtactgcttggctgtgaccgccatgaccacagtgtgttctgctgggcttaactggcatccaggcacttggcttccagcacagcactctttcccttcctccttctcatatactctctccttttccccttcctttttgtccccttttcctcttccttttagttcttctctttaaatgccttctcactctgcacggggtctagacttgacttctcctttggctcacttcttgccttttgtttcaggagtgtacaccttaaacaatgagaagcagtggataaataaggctgttggagataaacttcctgaatgtgaagcaggtgggtgctgagcacttaagagagcaggcaggcgtccagcggggaacgtcctagaggcacagccttccagtgcggcttcctctgagcacacaagagccaggaggagggatgtgggagaaccgcagctggccagggagagacttaagcagttaggtgatgactccctaagggtcaccaagggtcttgttcattagggcctgaagggcactggctgaatccattgtctacatcgcccacagattaggagagcctgtgcatacagagagcctgctagagagccctgggtctaaggagaagcaagctccagggagaacaagtcaaggaatgacataaaatcttaatccatggaagcctagcaggaggctggacatgggctggaactcctgcttctcgttattaggaggagctgttgctctctcctttcattctcagaacaagaggcaaaggcccagcctcttctgctcttactggtgtggaaatgccaacctgcctcgtattaactgcaccatctacaaaatctgagctccagccagtgctgctctagattcatctttctttagagagaatgaattattgtagcccctagccctttcaatgaatttcagggaattgtggaaattcctttattgggataattgtttaaatataatacagttcaccagccagggctcaaaaatctcagtatttcccacttcctttgttagaaaagtgggaaatagagctttttgtaatgtaaacaatttaaaaaacagaattattttaaaactgcaactattggaaatgagatcagcaggtggtaagggcaaagcatttaaatctttctactttacgcagcagtgacagccgcccatgctttcacccctttctcagatggaaaggctcttgcacatttccactcacgagtgtcttgctctccttgacagtatgtgggaagcccaagaatccggcaaacccagtgcagcggatcctgggtggacacctggatgccaaaggcagctttccctggcaggctaagatggtttcccaccataatctcaccacaggtgccacgctgatcaatgaacaatggctgctgaccacggctaaaaatctcttcctgaaccattcagaaaatgcaacagcgaaagacattgcccctactttaacactctatgtggggaaaaagcagcttgtagagattgagaaggttgttctacaccctaactactcccaggtagatattgggctcatcaaactcaaacagaaggtgtctgttaatgagagagtgatgcccatctgcctaccttcaaaggattatgcagaagtagggcgtgtgggttatgtttctggctgggggcgaaatgccaattttaaatttactgaccatctgaagtatgtcatgctgcctgtggctgaccaagaccaatgcataaggcattatgaaggcagcacagtccccgaaaagaagacaccgaagagccctgtaggggtgcagcccatactgaatgaacacaccttctgtgctggcatgtctaagtaccaagaagacacctgctatggcgatgcgggcagtgcctttgccgttcacgacctggaggaggacacctggtatgcgactgggatcttaagctttgataagagctgtgctgtggctgagtatggtgtgtatgtgaaggtgacttccatccaggactgggttcagaagaccatagctgagaactaatgcaaggctggccggaagcccttgcctgaaagcaagatttcagcctggaagagggcaaagtggacgggagtggacaggagtggatgcgataagatgtggtttgaagctgatgggtgccagccctgcattgctgagtcaatcaataaagagctttcttttgacccatttctgtgttgtgttcagtcttgagtcttttttatttgctcctttatggtccagggtagtcagaaggtatagagtctactgggagtatggcagaaaacaccctaaacccactggaaatcccgaaggtgatacaaactcttccaccttagggaatcatgctcactgattgagtgcctattgaatgctaggtcccagaaagttaactgttgtccttgttttacagacaaggaaacagagactcagagatggtaagtgagttgcttaaggttacatagctatgaaacagggaagcagaactttgaacccaggtctgtttgatacaaactcagaggtcctttcactgcatgctgttgcctcctcaaagtgaattaggagaaaaggcatgggcctggttgaggaagaggctagctcaaaatgggatggggaaaaagtgttttaacacagacagtaattcagagtttgggatctaacctaccagcactccagaaaacaaaagacaatgatgtaaaggcaggatctctggacttactgagtccaaatcacagaatggcccataaatttgctaggtaatttaggtttcctggccatcagttcctggtctcttccatgaaggacttgagccaggcgatggctaatgtccctatcagcaataaccttctggtattccataaagagtggggaggtagagtccctgcatcagtagaagctgcttttcctactgggaacaaacccaccctgcaccaggaatcaaatgcaggctgtctgagcctcctctcctgatggcaggtcatgctattaagggtctcccagaagaaaggttctggaactctgagaaacagaagctcttctaacagaactttttcttgctataagctttcaataccaccaatcaccagtgcaccttcttctcatgccaaaatacggcccctcctttgtagggtgtaaaacgacactgatgtcactctctctcaccaaggtctggccatctctgtgaagctctcctcacaggcaccctgcagattcatcaataaacttcaacaggttagcgccagtaggccaataagatgcacacttatattctagaacctgtgaaagaagtaatagccagaaactggaaaataacagtcaaactcttaaaaaaatgcctctcagaacacagtcacttacaccttttcctctggtagttctcttcagcaccaagtttcctggaagaacaagctactccccagttttcttaaagaattgtctgattgtattaagtaagtggcttctggtaaaataatggtaagagaaaagctctggcattctcttgatcactcatcttctctgccttcctccctagcaacatctcctggcctcagcctgtgggcttcagcaacaccaaactccatgttgctctctgacaagcccggccgtctccagttcttgggctttatttcctcgggggccctctgctgaaattcccttccccttgctgtattagcacctcctacccgccttcaacatgcaggcactgcctcctctaaggagccatctgtacttacgtagctgtgagcataggatggggcatacagcaggcacttaacaaatacttgtggaatggaaagaaactaagataggatcaaaaatacaaatcaagatgtgagagaaagacgatcaaaagccctcacgagggggtcgggcgtgatggctcacacctgtaatctcaacactttgggaggctaaggcgggtggatcacttgagggtgggagtttgagatcagccagagcaacatggagaaacctcgtctctactaaaaatacaaaaaattagccaggcatggtgatatatgcctgtaatcccagctactcgggaggctgaggcaggagaattgcttgaacctcggaggtagaagttgtggtgagctgagatcatgccattgtactccagcctgggcaacaggagtgaaactctgtctcaaaaaaaacaaaaaacaaaaaagaacaccacgggaaaatcaagtgtgaagcaagagctcaactcttaacaggggcaatgtttggagttttgttactggaaaagatagagaccttaccaggtccaaagtttgtagacacaggaattacgaaatggagaagggggagaagtgagctagtggcagcataaaaagaccagcagatgccccacagcactgctcttccagaggcaagaccaaccaagatgaggtgggtccacagctttccctcctgcctttcctctggttctttatttcagtcttttttgcatacattggtacagatgcagaaatagaacaaagaaacagggcaaatgggctaaattatagtgaaccaaagggcttagtgtgttaaatcttctccttttctgcatccatagaagacagtgctgctgtctttcccaggagataagatttactctcaggagtgtctttttccttgaggttacgtttttgtctttgtagggtatgtcatcagctcccgtggtaggcttcctggcattcggaatatatttactagcagatattttcctctttaaaaatgtataataagaaagactaatagtaacacatttgaatgacacaattaattgactagtacttgggatacacactagtacctgggatacatctaattaagacacttagatcttaaaaaataaaaagactttttgaaatgttgaaataataagactagaaacttttttttttgtgagacagagtctcactctgtcaccaggatggagtgagtggcgcgatctcagctcatcgcaacctccccctccccggttcaagcaattctcctgcctcagcctcccaagtagctaggactacaggcgtgtgccaccacgcccagctaatttttgtatttttagtagcgatgtggttcaccatgttggcccggatgatctcgatctcttgacctcgtgatccacctgtctcggcctcccaaagtgttgggattacaggtgtgagccaccgcaccctgcctagaaactattttaatagaagcaaatagtgcctgaatggtgggcgtctgttagcgagatggtgaactggcagatggcgcctgtgtgtcaatgcccatggccaccgtcctgctttcagacaccagttctcttccaggtaaccttctggcattttggggtttgagataccatttcctaaaggtgaattatcacaaaatactagaaataaccacataagtgtttaaaattattgttaaatacagtaagaaattcttcttcaaaagtttagcctgcttaagtttccttgtcctttgtttcctgctttcaaggccagacttccttactctctgtgtttcccctaccctggtaaacaaccttcctgccagtccttacccatacagcccacattccacatctgctacccactctgtgatttacctctcccgtcgcaatagcctctcccaccaaaactgatcttcccgccttcccaccagtgcaaccacattcctgcactttgcaagttagccaaccgggttcggattgtgcagtccaactccagccaatggagtcaggacacagtagcagggacaagctgcgttagacataaaaacctctgctttcctttgtttagggtgctctcgtggcaaccagacttaccaggagctctattctgcaaaagtaaatttgccttgctgagagaccctttgtcctttggctcagtgttggttcttctttgcagcaccgagcatttgtttccaacaaatttggtggcccatacagggaaaacattgtcctccgggaaagggttctttgatcatcctcttgagaggagaacacatcccactgtccttgttgcggtggcctcatgagtaggaatcgagacccacctgtctgatgaataaccccagactctcaacaacgtggggagaaaaagacttgcaacactatggtggccaggtaactctgtgcgcagaccaaggtaagaaatgtcgcaggagtgacaaagtacttccttggtggtcactatattctggtggctgaaagttcatgaatggtaacaagtgctactgctgtgtggagtgaatgagtccaatctgtgggtctatggttacctcatacggcttagccttctctgaaggatcctgatgttggggtttatatagtcctcccaatgctaagcgggacttaaaatattcctaggaggaaagtggccagagtggatgaagcaaaaggagaagagtgtgaagaacctccaggaggtggggctaaaagataggcaagaaatctctaatacgagggattgagccacagaaagctccagacagataaaaaagaaattcctaatatgaggaactgagccacagcaagcctccagcaggcaacaaatccctaatatgagggattgagcctagctaagacccaatatgggaaataccccaagaaagacagagaataagaaggatgaaaatagtaacaaggatataccccttgatagtcccctaggtttcatgttaaaatactggaaagataatgagaggactaagcataagaagaaggagcaaatgataaaatattgctgtttcatttggacccaaggtcccatcctcaaaccctcaatcttctggccaaagtatgggtcgaatgagggtgtaatgagtcaactcctaatccaatatgttaatgataaaagtctggtttctcaagaagaactagactatgctctttgttggaagcagggacctgtcctcctctttcccttaaagacaactagggaagaatccgatccagcatctcaaattgagaagtcagacaagccgactcccacacctaaagtcagcacatgggatcccctagactgtcttcctttgcttactgccccaatcctaacccccctactcctcaggcagctgctgctgccccagatcccatcccagattcttccccaactcatgatgttcctcccgcttacaaccctgactctcaggggcagtcgtcccaagagcctgttcattgccaacctaaatatccttccttaaaagggctccaacatgaaatagagcagtgtaaaaaggacattcagaactccccttttctttccacacctaaggagtcagccataactttcttccctttaaaaggggtatcacaaggaggggaagtcattggttttgtaaatgctctcttgactatttcagaagtctgaggtctgaagaaagaacttaagccactgctagatgacccctatggagtggcagatcaagttgatcaattcttagggacctcagttatacacttgggtcgagcaaatgtctatcctaggctcttcttttcaggggaggaaagaaagcatgatccgtagggctgctatggcaatttgggaacatgaacaccctcctggtcaaaacgttcctactgtggaccaaacatttgctgcccaagcaagactcctggtgggacaacagcaatgcagcccactgagaaaacatgcaggacctaagggaaataataataaaaggaatcagtgaatccatacccagaactcaaaagctctctaaagcatttgatatacaacaggagaaagatgagggacctataagattcctagacagactaaaggagcaaatgaagcaatatacaggtctgaatttagaagatccccttgggcaaaggatgttaaagatccattttgtcactaaaggctggccagatgtttcaaaaaagttacaaaaattggaggactgagaaaaccgacctctaagagaacttctcagagaagctcaaaaggtgtatgtgaggagggacagggaaaaacaaaaacagaagtcaaaaccaatgttatctactttccagcaggtggctccaaacccatatgctactaaatgaggcttccagggagccagaaactataaaaggtcccaagcctcccaaacccagtttagagaaaccaaaccttcagctagaggacccaagtctacatttcccaggccccctaaagagcatagaaaagcaagaccaaaaaatcccaaaactgagagaggggaaggacaagataagtgttacaaatgtggaaggacagcccccttcaaaagagaatgtcccaaattagaaaaggagagagaagcccttccactcacgacctttgaagaggaacagggaagtcaggggctctgtctatattatcttgagtcccaccaggagcccttgataaatttggaggtgggacctacacatgagcttatcacatttttggttgattcaggagcggcctgttcctctgtttgtttcccctcatctaatgttgcctgctcttcagaagaacttatagtctctgagataaaaggggaaggatttacggtgagaatcttagaaaatacagaagtcaagtaccaagactaaacaacccaggttcaatttttgttaatccctgaagcagcaactagtttgttaggaagagacttaatgttaaagttaggcataggcctacaagtcagcccaaagggattccttacttcattaaacttactcaccacggcggatgagaaatacattcatcctgatgtttggtcaagggaagaaaactgaggaaagcttcgaattctcccaatccacatcaagctaaacaccccgcactgggaagtagtgaggaggaagcaattccccattcccttagagggcatgctagggctaaaacctataattgaaagtctcattaatgatgggcttcttgaaccctgtatgtctccttataacaccccaatactgcctgtcaaaaaatcagatgggtcataccggctggtgaaagacctcagagccattaaccaaacagtccagaccactaaccctgttgtccccaacccttacaccattctcagcaaaattccatataatcatcaatggtttactgtaatagatttaaaggatgctttttgggcatgtccctggctgaagagagccgagacacatttgcctttgagtgggaagatccccagttagggtgaaaacaatggtatcaatggacagtcttgcctcaggggttcatggattcacccaacctttttggtcaaattttagaacaagtgctagacaaagtttctgttccaaaacaattatgcctgcttcaatatgtcgatgatattctcatatctggtgaggatatagagaaagaagctggcttctctacacatatttttgaccatctacagttcgaggggttacgggtctcaaagggaaagcttcagtgtatggaacctaaagttaaatatttaggccgcttaataagtgcgggcaagcgaaggatagggcctgaatgggtcgaaggaatcgtgtccttacccttgcctcagactaaacaggaactcaggaaatttttagggttagttggatactgccgcttaaggattaactcacatgccctaaacagtaaacttttataccaaaaacttgcccagggaaaacctgagcatctcctgtggacttctaaagaggtcgatcaggtcaaagagctaaaaggaatagcttataactgctcttgccctagccttaccttccctagaaaatacacttcaccttttcgtcagcgtgaaaaatggggtggctttaggggtgcttatccaagagcacagaggctgctggcagcccatggccttcctgtcaaaaattttggacctggtcacctgtggatggcctcagtgcatccaatccattgcagctacagcagtattagttgaagagagtagaaaattaacctttgggtggagattaacagtaagcacaccccaccaagttagagagctattttaaataaaaaagcaggaaggcgactaactgactccagaatcttaaaatatggggctattctactaaaaaaagatgagagaacacctatgtctagatttaattgactaccaaacaaaactcaggccagatctaggaaagatccctttcaaaacaggacggcacttatttatagatggttcctcccagctgattgagggaaaaagacacaacgggtatccagtaatcgatggagaaattctctatgtataagaacagagtcaagaaaattgcctaataattggtctgcccaaacttgtgaactgtttgcactcagccaagccttaaagcacttgcaaaaccaggaaggaaccatctatactgattctaagtatgcctttggagtggctcatacatttggaaaaagttggactgaatgtggcctcactaatagtaaaggtcatgaccttgttcataaggagttaatcatccaagtactggataaccttcagttgccagaagaaatagctattgtccgtgtacccgggcaccagaaaagcctttcttttgaaagtcgaggaaataacctaacaaaccagatagccaaacaagctgctgtttcctccgaaacacctatgtttcacttaactccttgtcttccttcccctactgcaatttcctttttctcttccattgaaaaagaagaataaagataggagccaaaggagaagaccagaatgaaaacggctgttactagaccaaaaggaaatgttatccaagcccgttatgtggaagatctagtctcaactatatctgaggacacactggggatcccaagccatgtgcgatgcagttctcagggtctatggatgtataagaatttacaccctagccaaacaagttacagatagttgcttaatatgtaaaaagactagtaagcagattctaagaaaaccgccccttggagaaagagattcagggctaagaccatttccaagtgttcaattaattatactgaaatgcccccaattggtcatttaaaatacttattagtaataatagaccactttacctactgggtagagactatcccacactcaaatgcaaccaccagtaacgtagttaaggcattaattgaaaacattgtacccagatttggactaatacaaagcactgattcagacaatggaacccatttcactgcatatgtcattaaaaagttagcccaggtactagacataaaatggaaaaaccatatcccttggcatctctcctcctcaagaagagtagaaaggatgaatcagactctaaaaagccacttaactaaattagttctagaaacttgattgccatggactaaatgtcttcctattgccttgttaagaatccgaactgctcctcagagagatactggcctttccccttatgagatgctctatggattgccctatttatactccactgctaacattcctacattcaaaataaaagatcagttcctcaaaaattatatacttggtccatactctactttctcttcccttaagactaaaggtctcctagcacaggcgccaccgctggagtttccagcacattagcgtcagcctggagaccatgtcctcataaaagggtggaaggaaggcaaactcaaaccagcttgggaaggaccctacttggtgctcctaaatactaagactgcagtccgaacagcagaatgaggatggactgatcacacccgcgtcaaaaaggcgctgccacctccaggatcataaaccgtcactccagggctcaccccaaccaaattaactctaaaaagggcttaataatcacttgtttattttttcttttctttccaacagaaggtcatcttgtcatcaatgtaacttgggctaaccatcctttaatccttcagtttgatgcttgttcagtcatcctgtgtggagacaagcaagctcaaaggaagctgtctcatgtagataagtacctatgtccataccataaaaagtcaaccaagtataagtatagaaccttaaaaagtccctgtggtgactggacagatgtttggaaaccactcagtatggagggtggacagccaggcccccttttcaaataagttatggggactaaaacagaaactccaactaattcatggtcccaccccaccaaactgtaagccactgcagtgtaacccctcattgctaattatagctaacccccaaacaatggcccaagaacccactatattcaaacagtatggattaggagcaaatgttacaaaacaaaatcccataaaaatcttcaaccactggttaacaatgataattaaaaaaaaatccacacccagagtctgggaaacgagtggaatctaacactctctccaagtatagcgagctcagcgtcctcctcccatctccaaaacaacccaactaaagtaacggttgtaaaggtaaaaaatttaaagcagactatagcccaactaaagtaacggttgtaaaggtaaaaaatttaaagcagactatagccctagagacaggatatcaagatgcaaagtcttggctaaaatggattaaatattccatctgcactttaaacaaatatgaatgttatgcttgtgctcacggtagaccagaggcccagattgtcccctttccactcagatggtcttctaactgaccgggcataagctgtatggtagttctcttccaagatcacacagcctggggtgacaaatcatgtcaagctctttctctgctgttccctgaagctcaacaccctgagggtcagcccccgagggccatcagcttccgtttcccaatgccaattttactttgtgtctctcacaacagggagaaaacttggtgttccttggagccttaatgggatgcagtgagcttaagtccttccaagagcttacccatcagtctgcccttagtcatcctcgagcggatgtatggtggtattgtggtggaccattactggacactgccgagtaactggagcagaacatgcactctaattccattggctatccctttcaccctggcatttcatcaaccagaaaagatagaaaccaaacactgtaaaacaagagaggcccctcatgggtctgttgactcccacatttatatagattccactggagtccaacgaggagtgccagatgaatttaaggcccaaaatcagacaactgcaggatttgaatccacgttcttctggtggttaactataaataaaaatgtgaattagataaactacatttattacaaccaatgatgatttttttttttttgacggagttttgctcttgttgcccaggctggaatgcaacggcatgatctcggctcaccacaacttctgcctcctgggtccaagcaattcttctgcctcggcctcccgagtagctgggattataaacatgtgccaccacgcctggctaattttgtatttttagtagagacagggtttctccatgatggtcaggctggtctcaaactcccgacctcaggttatctgcctgcctcggcctcccaaagtgctgggattacaggcatcagccactgtgcccagcctatgatttgttaattatactagagatgctcttaaagggacagctgaacaattaagacccaccagtcaaatggcctgggaaaataaaatagcattagacatgataccagcgaaagaaggtggagattgtgtcattatcggaacccgatgctatacttttatccctaataatactactccaggtgggatcacaccaaaagcactacaaggtcttaccgccttatcaaatgagctagccaaaaattctggactaaacgaccccttcacaaatttaatgggaaattctttggcaaatggaagggatttatgtcctcaatcctcatgtctcttgccatcagaatagggttgcttattcttgtaggatgctgtgtcataccctgtgccctaggattaatacaaaagctcattgaaacagctctccccaaaacctccctcaatcctcctcctcctcgttccagtgagctttttcttttagaagacccaagtagaataacagagccaaattatgttaaaagggtttaagaaaaaatactgtaaaatatttaacagggggattrtgttaaatacagtaagaaattcttcttcaaaggttcagcttgcttaagtttccttgttctttgctccctgctttcaaggccagacttccttactctctgtgttctccctgcgctggtaaacaaccttcccgccagtcgttatctatagagcccacattccacatctgctacccactctgtgaattacccctcccatcacaatggcttctcccggcaaaactgatcttcctgccttcccagcagtgtaatcacattcctgcacttttcaagttagccaaccgggttcagcttagattgtacggtccaactctagtcaatggagtcaggatacagtagcagggacaagctgcgttagacataaaaacctctgctttcctttgttcggggtgctctcgtggcaaccgaacctatgaggagcaaccttatgcaaaagtaaatttgccttgctgagagaccctttgtcctttgtctcagtgctagttcttctttgcagcaccaagcatttgttttcaacaattatatatttaaggaatctttgattatggaaaatttcaagaagtagagggaatagcatactaagccctctgttcccatctttgagttatctacattttattagaagtatctttggggtgactgagggaggtttctctttcctggagggcttctgaattattgccaatgtaccttcctgactgcagccagaaactgaggcccctatacctatgtacctttctatccctctctgaagcttctgcagaattcccagcaagacagagcttgctggaagcttggtatgctcagaagcagctaaagcgtgtatgtggggcggagggtgggggcaacttcttggtcctagcacttccatatattgattttcttttctggctgcttagtgggaggagtgtgtgtgtatgcatgtgtgtgtgtgcgtgtgtgtgtgtgtgtacatgcctgtgtgtgtggatgcatgcatgtgctgtgaagcagggagaccagctttccgttccttcttgttttctctctgcagtgacctgggagctgtcatttccctcctgctctggggacgacagctttttgcactgtactcaggcaatgatgtcacggatatttcaggtcagtctttgagttgggtaggagcatgcatccctggcactgccacatcccactctgactctctcgggtctgcattctttctttgagaacacacagttccccattcttatcctgacctctgggctttcaggactgccaagaacattggggatcctgccagaaatgaggggagcttgagctttcgttggcttctatttggggtagaaggagattgatatgcagagcagcttccactcatctgacttttcatgggtctctgggaacaatttccaaatggtaaactctctggcttctctctctttgcagatgaccgcttcccgaagccccctgagattgcaaatggctatgtggagcacttgtttcgctaccagtgtaagaactactacagactgcgcacagaaggagatggtaagacctggacaactatctcctgtgctctacctacaacccctgctctgacatttccatgatgggtggtgctgaggtgatttgccagaaagttcgttgctctccttggagccaggagatttagattctgataagcgttttgtcgccagtagccatggccctttgggcagactaacttttgtcagcctcaagttttctgttttgttaaggggaggtgatgccatgcagcctacctcatgtaaatctcagagtcagatttacatctccagcagatgtgggaaaagaaggaatgctgatgatgatgtcaccctcacctagtgagtcttgctgtcctggcactgctctaagggctttatatttatttgctcacttagtccttacagtttacctctgaacagaggttattattctcactttgccgataaggaaacagaggcaccgacaggttgagtatcttgcccaaattcaggcggcctgtaagaggcagagtcaggatttgaaccctgagccctccctgtactgcttggctgtgaccgccatcaccacagtgtgttctgctgggcttaactggtgtccaggcacttggcttccagcacagcactctttcccttcctccttctcgtattctctctcctttctcccttcctgtctgcctcctttcttcttcttctttttaattcttctccttaaatgccttctcactctgctctgggtgcagacttgacttttcctttggctcatttcttgccttttgtttcaggagtatacaccttaaatgataagaagcagtggataaataaggctgttggagataaacttcctgaatgtgaagcaggtgggtgctgagcactgagcacttaagagagcaggcaggcgtccagcggggaacgtcctagaggcacagccttccagtgcggcttcctctgagcacacaagagccaggaggagggatgtgggagaaccgcagctggccagggagagacttaagcagttaggtgatgactccctaaggatcaccagggtcttgttcattggggcctgaagggcactggctgaatccactgtcggcattgccacagatcaggagagcctgtgcatacagagagcctgctagagagccctgggtctaaggagaagcaagctccagggagaacaagtcaagggataacataaaatcttaatccatggaagcctagcaggaggctggacatgggctggaactcctgcttctcgttattaggaggaactgttgctctctcctttccatctcagaaccagaggcaaaggcccagcctcttctgctcttactggtgtggaaaggccagcctcttctgctgtgagtggtgtggaactaccaacctgcctcgtattaactgcaacatctataaagtatgagctccagccaatgctgctctagattcctctttcttcagagatgatgaattattgtagctcctagccctttcttttttctttctttctttttttttttttttgagacagagttttgctctcgtcgcctaggctggagtgcagtggtgctaattcctgacctcaggtgatccaactgcctcagcctcccaaagtgctgggattacaggcgtgagccaccgcatctggcccctagccctttcaatgaatttcagggaattgtgaaaattcctttgttgagataattgtttaaatataatatagttcaccagccaggcctcaaaaaactcagtatttctcatttccttatttagaaatagagctttttgtaatgtaaacaattaaaaaaattattttaaaactgcaactattggaaatgagatcagcaggtggtaaggacaaagcatttaaatctttccagtttatgcagcagtgacagccgccaatgctttcacccctttctcagatggaaaggctcttgcacatttccactcacgagtgtcttgctctccttgacagtatgtgggaagcccaagaatccggcaaacccagtgcagcggatcctgggtggacacctggatgccaaaggcagctttccctggcaggctaagatggtttcccaccataatctcaccacaggggccacgctgatcaatgaacaatggctgctgaccacggctaaaaatctcttcctgaaccattcagaaaatgcaacagcgaaagacattgcccctactttaacactctatgtggggaaaaagcagcttgtagagattgagaaggtggttctacaccctaactaccaccaggtagatattgggctcatcaaactcaaacagaaggtgcttgttaatgagagagtgatgcccatctgcctaccttcaaagaattatgcagaagtagggcgtgtgggttacgtgtctggctggggacaaagtgacaactttaaacttactgaccatctgaagtatgtcatgctgcctgtggctgaccaatacgattgcataacgcattatgaaggcagcacatgccccaaatggaaggcaccgaagagccctgtaggggtgcagcccatactgaacgaacacaccttctgtgtcggcatgtctaagtaccaggaagacacctgctatggcgatgcgggcagtgcctttgccgttcacgacctggaggaggacacctggtacgcggctgggatcctaagctttgataagagctgtgctgtggctgagtatggtgtgtatgtgaaggtgacttccatccaggactgggttcagaagaccatagctgagaactaatgcaaggctggccggaagcccttgcctgaaagcaagatttcagcctggaagagggcaaagtggacgggagtggacaggagtggatgcgataagatgtggtttgaagctgatgggtgccagccctgcattgctgagtcaatcaataaagagctttcttttgacccatttctgtgttgtgttcagtcttgagtcttttttatttgctcctttatggtccagggtagtcagaaggtatagagtctactgggagtatggcagaaaacaccctaaacccactggaaatcccgaaggtgatacaaactcttccaccttagggaatcatgctcactgattgagtgcctattgaatgctaggtcccagaaagttaactgttgtccttgttttacagacaaggaaacagagactcagagatggtaagtgagttgcttaaggttacatagctatgaaacagggaagcagaactttgaacccaggtctgtttgatacaaactcagaggtcctttcactgcatgctgttgcctctttaaagcgaattaggagaaaaggcatgggccttggtgaggaagaggctagctcaaaatgggatggggaaaaagtgttttaacacagacagtacttcagagtttgggatctaacctaccagcactccagaaaacaaaagatgatgatgtaaaggcaggatctctggacttgctgagtccaaatcatggacttggcccaaacatttgctaagtaatttaggcttcctggccattagttcctggtctcttccatgaaggacttgagccagggtaacgtccctatcagcaataagcttctgggactctgtaaagagtggggaggtagagtccctgcctcagtagaagctgcttttcctacttggaacaaacccacccttcaccaggaatcaaaagcaagctgtctgagcctcctctcctgatggcaggtcatgctattaagggtctcccagaagaaagcttctggagctctgagaaacagaagctcttctaacagaactttttcttgctataagccttcaataccaccaatcaccaatgtgccttcttctcatgcgaaaatacggcccctcctttgcagggtgtaaaatgacactgatgtcactctctctcaccagggtctggccatctctgtgaagctctcctcacaggcaccctgcagattcatcaataaacttcaacaggttagcgctagtaggccaataagacctatattctagaacctgtgaaagagataatagccagaaactggcaaacaccagtcaaactctttaaaaaaatgcctcttagaacacagtcacttacacattttcctagatctcttcagcaccaagtttcttggaagaacaaggcactctgcagttttcttaaagaattgtctgattgtattaagtggcttctggtaaaacaacagtaagagaaaagctctggcattctcttgatcactcatcttctctgccttcctccccagcaccacctcctggcctcagcctgtgggcttctgcaaagtcaggtatcaggactaattagctagcatcaaattcctgttaattccagaagcagggacaaacctgttggggagggacttaatgacaaaattaggtataggtctatacgttaatcaaggaaaattctcaacttccttaaacttacttaccaccctagaggagagccaaatccactctgatgacgtttggtcataggaaggaaattggggaaaattacaagtttctccaatccatgtaaaattaagaaatcctggggaagttgtaaagagaaaacagtaccctattcccttgaaaggcagaataggtttataacttataatcgaaggtctccttcaggaaggacttcttgaaccccatatgtcctcttacaacactccaatattgcctgtaaaaaagtcggatgggtcatagcggctactgcgagaccttcgagccattaaccaaatagtccagaccacccaccctgtcattcctaacccttacaccattatcaagcaagatccctcatgactgccagtggttcacagtaatagacctcaatgatgacttctgggcttgccccttagctgtggatagctgggacatatttgcttttgaatgggaagaccctcattccagttggaagcaatagtagtgatggacagttctaccccaagggtttacagactctccaaacctattagtcaaagtttggaacaagtcctagagaatttccctctttcatcatccttatgtctactccaatatgtggatgacctgctcatttccagaggcaccaaagaccaagtaaccgcaattttaattagctttctaaatttcctaagggaacaatggttacgggtctcaaaaagtaaactccagcttgtagaacctgaggtaaaacacatggggcacttaataagcaaaggtaagcggaagatagggcccgaacaaatggaagggatcatatccctgccactgcctgagacaaaacaagaacttagaaaattcttcaggctagctggaaattattgcctgtggattgactcttatgccttaaaaacaaaacctctatatctaaaacttacccaagaagggcctgacccccttctttggaccccacaagaagtccagcaagttgaggaactaaaacatctacttataactgcccctgtcttagctctgccatccttagaacagccatttcacttttttgttaatataagcaatggggcagctataggagtactcactcaaaagcatggggccattgccagcccacagcctttctgtcaaacattcttgacgtggtaacctgtgggtggcccgaatgtatccaatctacagcagcaactgttttattgacagaggaaagtagaaaaataacctttgggggaagtctcatcctaagcacaccccatcaggttaaaaccattcttagccaaaaagcagggagatggcttacagattcaagaatcctaaaatatgaagctatcctattagaaaaaggtgatttaaccctaaccactgacaatgtgctcaaccccgccaccttccttttttttttttttttttgagatggagtttcactcttattgcccatgctagagtgcaatggcacaatctcggctcaccgcaacctttgcctcctgggttcaagcaattctcctgcctcagcctaccaagtagctgggattacaggcatgctaccatgcctggctaatttttttgtatttttagtagagatggggtttctccatgttggtcaggctggtcttgaactcctgtcctcaggtgatctgcctgccttggcctcccaaagtgttgggattacaggcgtgagccactgtgcccggcctaccccgccaccttcctgacaggaaatccaaacgctggagaccccaagcacaaatgtttagacttaatcatcaaactaaagtaaggcctgatctaagtgagacccctttaaaaacagggcaccatctctttgtagacagctcctctcgggtaattgaagagaaaaaacataatggctactcagtggttgatggagaaactctcacagaagtagaatcagggagacttcccaataactggtctaaccaaacatgtgagttgttcgcactaaatcaagccttaaaatagctgcagaatcaagaagggactatttacaccaattccaaatatgcttttggagtggcccatacctttgggaagatttggactgaacaaggccttattactagcaagggccaaaaccttgtccacaaagagttaatcatgcaagtattagaaaaccttcagctaccagaggacatagccattgttcatgtcccaggacaccataaaggtctctctttcaagagttacttcccaagaagcacccattttccactgaaccccttgtctcccttccccatctgcaacccccatcttctcccaagcagacaaagaaaaattaaagaaaataggggctaacaaaaactcagaagagaaacggatactgccagataacaaagaaatgttgtccaaacccctaatgacagaaatcttaacacaacttcaccaagggacccattggggtccccaagccatgtgtgatgcagtccttagaacctatgggtgtacagggatttataccctcaccaggcaagtcacagacagttgtatggtatgcagaaaaaccaataaacaaactttaagaaaactgcccttcggcggaagaaatcctgggctaaggcattccaaagtgtccaaattgacttataccgaaatgccccaaataggctgcctcaaatgtttgtcagttatagtggaccatctcactcactgggtggaagccattcacctgccaagtgcaactgccaataatgtagttaaagtactaatagaagataccatacccagattcagattaatagagaacattgactcagacaatggaacccattttactgcacaggtcattaaaggattaacccagacactagagataaaatgggaatatcatactccctggcacccaccctcatcaggaaaagcagaaagaatgaatcaaaataaataaatcacctaactaaactaatcttggaaacccgactgccatgaactaagtacctccctgtcgccttactaagaattcgtatcgccccttgaaaagatatcggcctgtccccttatgaaacgctctacagattgccatgcttaaatccaccactgacatccctacatttgaaacaaaacatcaatttcttaaaaactatatacgtggtctatcttccacccttttttccctcaggacccaaggcctcttagcacaaatgccgcctctagagtttccagtacacccacatcagcctggggattatgtgctcatcaaaagctggagggaggaaaactcgaaccatcgtgggaaggaccctatctaatactcctaacaactgaaacagcagcccgaacggctgaacaggggtggactcatcacacttgggtaaaaaggaccccaccccttatggaatcatggaccatcactccaggaccaactccctcaaaattaacattcaaaaaggtctaatttgtctcttcttccccctaatgcccaggggcatttcatttttttttttttttgagatggagtctcgctctgtgcccaggctggagtgcagtggcaagatctccactcactgcaagctctgcctcctgggttcacaccattctcctgcctcagcctcccgagtagctgggactacaggtgcctgccaccatgcccggctaattttttgtatttttagtagagacggggtttcacagtgttagccaggatggttgatctcctgaccttgtgaactgcccgcctcggcctcccaaagtcctgggattacaggcatgagtcaccgtgcccagcccgcatttcattgttaatgtaaccaggtcagcctcccctcaagctgttgtgtttgatgcttgcctagtcataccttgcagagacctacaaagtcaaaggcaactagcctcttcagaaaagtatctttgcccttggtactcaccccaccctcaatctgatccttgcaagattccctataattggctaccttgccattcctggtacgatattctctggaccactcagtcccaaggctggacttcttcagcaggctgcacctccctaaaaccttatatccattttactaaacaaaataactcctctaactgccaacacctccgatgtaacctggtgcatatttctattactacttcaacctccactaaccatattcccaccctaagtcgcttttatggtatggggcagatgttagcgggaaagaccccatagggtcctttgagattcgttttgtcgcccctccagcaccccttcctttccgaagatctcctccaaatgaaacaactatcttgccactacctaatgacaaaactaaagtgcacatagtggaagtcaaagacctaaaacaaaccctggccatcgagaccggacaccaagaaatgaatgcctggctgaaatggatcaaatattcagtttgcactttaaataaaagcgactgttatgcctgtgcaatgggcaggccagaaatccaaatagttcccttcctgcttggatggtctaaccagccgggcatggactgtacagtagctctcttccagcaccccacagcctggggtaataagtcatgcaccagtctctcactgcttttcccaaaagtcaaagacttccctgtgggtcagcccccaaggccatctggctcctggcctctgatgccaattttacctcttgtctctcatgacggggaaaacttacatctttcaggaatctaacgggatgcagtgaatccgagccttttcgagagctcaccaatcagactgcccttgtctatccacaagcagatgtttggtggtattgtggaggacctctactgggtatgctgccaaataattggagcagcacttgcactctaatccaactggccatctctttcaccctggcatttcatcagtccgacaaaaagtcaccctcttgggaagaaagagaagctcctcaagggtcttttgacccccatgtctatatagaggcaattggagtaccacgagtagccgccaatgaatttaaagctcgaaatcaaatagctgccaggtttgagtcagtcttattttggtggtctactataaacaaaaacgtagactggataaactatatatattacaatcaacaaggatttgttaattataccagagataccatttggggatagccgagcaatttggtcccaccagccaaatggcctgggaaaactggatagctcttgacatgacattagcagaaaacggcagagtttgtgtaatcatcagagcccaatgttgtactttgatcccaaataacacagctcccgatggaaccactaccaaggctctacaaggcctcaccaccctagcaaatgagctggctgaaaattctggaatagatgaccccttcacaggtttaaccaaaagatggtttggtaaatggaaaggacttatggcctctatcctcacttcccttgccattgttacaagtgcactcatccttgtaggctgttgcatccaccttgtgtttgtgggttagttcaaagactcatagaaatggcttgcactaaaaccttctctgtctctccccctccatattcagaccaacttttactcctagacaatcaagaagagcaacaaagccaaatcttactaaaataatttgaagaggaagaattataacaacaaaaagggggaaattgtcagaataaaagaaaggttcctcttcaaagatccaactttcttgtcataggctgtaaaccgccttgctccaaaccttaacctgtaacctttaccctctgccttatttgagaaagattcaagcgcatagccaattggagtcagcctagactgtgcggtccaacccagccaatggggaaagacaaagaagcaggaactgcgttagggttagaaacctgttctcctttattaggtgtgcttttgcgactgctataggcgcgggcagcacccttctgcagaagtaaactttgccttgctgagaaaacttttcttctgagtgctcctcttcctctgcggcactcagaaataagagaacttatttctaacaggaggaagaacatgataattttgcacacgcaggttctgagttttggctggtgcgctgagtgcttaccataccgcaaatactgtgtgatctgggctgaagaacagaaaacccaactaacagtgacttaggcaaaaagaaattttattctttcacagaagtctgtggcaggcaggtccagagttcatgcaggagctcaataacatcagagattgggctctttttgttcttcttagcatatcgatgttttacgtgatgctgggcacctcggggacctaagatggctgttgtagctccatgcatcatgattaaaccagagacaggaagtgtacgatggaagaggccagaggtgaatggcctcctcctctccttttgtcttattcctggagtgactccctcctcttatcagcagggatacaagcagtgcctggcagccttccctctctcctgtatgagccaaaagcaagactcatggcacccctccctgcaggaaaggggtggaatgggcccctggcaaagggggctggacttgcagtgacagtgctgctctgaacaggactaggcttctgttggagaggtggtcagcggctgctaggcaggtcacaagctgcctcacccatggctctccagctctgcacctaccctctccttctaataaatctgtttcaataaccaccacgaggtttaaagaggagcagtaacttgcccacggttgcgccaggcacccctagaagagcaagaattccttacaaagttattaaaacaggcaaatcccatataggtgacatttctatccaacaatgctgacatctcttttagttttgagccttagtaatccaattttctgcctcaggaagaggcagcagcttctgggaaaaatctgctcctgctaaggtggctcattcattgttttacctgaatagagtggtggatggtgaaggttcaaattctcactttccatattaaattttataacataaaaaataattaaatggggtgcgcgcggtggctcacgcctataatcccagcacctgggaggctgaggagggcagatcacgaggtcaggagatcgagaccatcttggctaacacggtgaaactgcgcctctataaaaatacaaaaaattagctgggcatggtggcgggcgcctgtagtcccagctactcaggaggctgaagcaggaaaatggcatgaacccaggaggtggagcttgcagtgagccgagatcgcgccactgcactccagcctgggtgacaagagtgactcggtctcaaaaaaaaaaaaaaaaattaaatgagccaaccaggacaatgtttaaaagccagagccaaaaaggctccaaaataaaacaaacttgtctgctcaattaattatttgaagagaacctacagtaatacagactggagatgggaaagcacgagggatgtatgagtcgaggaaccggcaaaggggtgtgggggtgtgtgtgtgtgtgtgtgtgcacacacatgcacccagctagggtagaaaataagtacttttgcttctatgggaagtgactttccagttcacttgtgtatcaaatgaacatgatgaaatcaagttgtactagccaatgtttgggagggttctgtattaaagggataaagaaaaacattagaaagagaagttacaaaaatcactgtggggaaaatgaacaccaatgacttggctgctctgaggcttgcagggagtagacagttaggcatcccaggtcatcagagaaccagtggggtcttttcctcaggggccgggttttctacacgcaagtcaaacctcttctcctctgggacacatgtttccaaaggactccagaaacacagcacagctggattcaggtactgtgtcaagatgtgccttcttcttcatctttgacagcaattaatgtactaaatgtcttgatagagaaggtcatatttgggaatattcttgggatcaataggactttggacaataagcttccccctcattgctcctcgatagattacttcaatcaaatctatgaagtcttgtttggttttgaagcttcccacaaacttagtgtgatctggagatctagacagcatagaagagaaacaactgctctaagaactttgagtaatcacttgttgaagactttcaggataaacaaaatgaaaaacagctttgttattttcttcttgtcaatgagacttcagaaataaagcccaacattaatttttcaatcatttttttccatttagtaaatgactcaacccagtgctgtgggccactagcatgaaagctctgtcatgtgcaaagctttagcttcaaaagctattgtaatcacaaaatctatttttatcacttctcaaatcatcaagcagctttcaccaagtgttggagtgcacattgtttcttcgtttgctgttgttgcttttgcctgggcattgtgcaaagcccattcaatattcatggccttttgatgttggtaggtattaaaaaattgattttttagaaaagtatctcaaacaccaggtatgttactgtaaaattttaaagaaataaataaaatcacggatgaggccagaggccagaggtcacttttcagtgtctatccttccaatcttgtgtgtgtgtgtgtgtgtgtgtgtgtgtgtgtgtgtgtgtgtatgtgcagatacaaacttcttttttcccaacattgggaattatgtcatacaaattattcagtaatatgcttttttctagctgacatatatttctttcatttgttaaatgtgcatctgcaacatcatattaaagtcctggaagtgtaattactgggttaaaaagtttaaaaactttaaactatttgatacataatgttgaactggcccccataaaaggttgtaccaaattaatacttacatcaaatgtgttccagtagaataaacagctttaaaatacttttgtgctttttttttgttgttgttgttgttgttttgcgatggagccttgctctgtcaccagactggagtgtagtggtgcgttctctgctcactgcaacctccacctcctgggctcaagcggaatctcctgcctcagcctcctgagtagttgggattacaggcacccaccatcatgcctggctaatcttttttttgagacggcagctctgttgcccaggatggagtgcagtggcgcgctctcggctcactgcaagctccgcctcctgggttcatgccatttttctgcctcagcctccagagtagccgggactacatgcgcccggccaccacgcccagctaattttttgtatttttagtagagacagggtttcactgtgttagccaggatggtctcgatctgctgacctcataatctgcctgcctcggcttcccaaagtgctgggattacacgcgtgagccactgcgcctgccatgcctggctaatttttgtatttttagtagagatggggtttcactatgttggccatgctggttttgaactcctgacctcaaatgatccgcctgccttggcctcccaaagtgctgggattacaggcgtgagccactatgcccagcctaaaacactttaaaacagataatatttcacatactttcaaataaagacaaaaagggtacacagatctagataagtggacacatcaaccacagtaagaaatgatcagaatcatggatgcacccaatcatcaatattaagtattgagatggtaattggatggagtggaaggcactaaagaggacatcatgttacttattcttgacaggctttgttgaagaatgatttaaaattcaatggcgaaaagcaggaaactttgcaagagagaagcacatcttagtttgctagaaggaatgtttctttcataaatgccacttaccagtccaaaagcttaagaaaaactacatgttttgtttcaaatgaaattcctgggaaaattttaagagttctttatttagctaatatggctattttatattttatagacttatggatggtagtgctttgccacctgtactatttcttcatacttaagtcggaaattaaaatttgacaaaccatgtgtatgcactattaaaaaaataaataaaatttgacaatcataccagaagcactctcattttgtagcaaggttttgcataaaaaattagagagtgcgtcaattggggaaacagtactgatataagactcacagagccaacatcacatggaaataggcaagctactgaaaatgcttaccaaggaaacttacaaggttgcaattaacttcagatcaactgcacttacccataatccactttcatatgctgcccattgaagaaaaagacagtagatggaatataactgatgtcaaaatactgtgtataaactgcagtttggtccacatctaccaggtatatagcagccattttacttaagtcagaagaggtcttagaaagctgcaaatgacgagagagacaaaggttacaatatgagaggcagcttaatgtttcttctgtgaaacttgttactacaacagagtgttttgtttgaaaaaactcctgggccaacaatgcagcccatgtggctcccacattagacaaagcataaccccatcctccagagtctcattcactgcaacggggttaggagggaatcttggggaaaactgtatgaggttaggaagggaccttggggaaaactgtgtgaggttagaaggggaccttggggaaaactgtgtgagtttaggagggtgacagcatgggagtattcctgtctattcattgtggagagagacctaacccagaactaagacctctacccgccatttctactgctgccatcccgtgttaagagctgagcatacaaatccttgggaaaactgtgtgaatctgtttcttcctttaatttctttctttgaatgcttttataaaagtagcccatgctcatttaaaacaacacaacttagaaatatgttatgtggatactgaaattccctaacgtctccttcctcccaaccctcccagaaatgaaaaccacgataattagtagcagacacttatataacattactatgtggtaactgtcctaagtgcttaacatttgttaactcatttaatccttacatcattcttataaggtatatgctatcagagtccccattttatagatagggaaactgaggcacaggaaggtaaagtaatttgccccaggtcacacagctcctgagcagtagggctggggtttgaactttggcagtgtggcttcagtataccactgacctctgtggtatttcctcccgcctatgactgagggtagagttctctggcccttttttccccaagttaacacactgcaccttcattgcaattatggaaacgaggatttgtacgctcagctcttacacgggatggtagcagtagaaatggcggtaagaggtcttagttctgggttaggtctctctctgcatcaggcacatactggaggcagcacactagaaaagattatttgcagctacagaaaactgagttcaaatctcaactctgcaatatagtggatctgcacctgtgggaaattacttgacctctctggttttttttttcctactgggaaatggggctactattatcccactattgcgagcactgaaaagatagtgttcacagatgcttgttaattagttttctgctcttccatcaccttgttggtgaaacagcattgacagcttctagtgggtaaggacatccaagacagattcagcacacacagatttgggggcttggttcagggcaggcacacaatcagctcttagtgaactaacaaatgaacagctatatacccaaccctgactactccctctcatgtactactcagatgctgaagtgagaatatacagattattaataaaaaccaattattttagacattcacttacaatatcatctagctgcagacagacaggatcttcatctctcccaaacctgagaaccaacaccttctcagcagtactttttatcgcctggtctacttcctttttgctagtcagcttgggcagtaggaagctcatcttgaaataacccaaatgtgaatcctcactgtcactcctgaaataaaggtgcaatgtttaaagacagtttagattaagtgcgtgagccctcattaaaaaaaattaattcacagagtagctaatgtattcacatggtatgaaagaaacatcatagaaaggtaacactgtggagtttccctctctttgtccctgctccttggaaccagttttcattgttccctcccccgggccagataactgctttcattagtttctcatgtatctttcagagttttgttatgcattcaccaaaaaatacaaatatgcgttccgatattttttttctctctctccccacccccaaaagatagcctattgtatcagtgttccagcaggaaagcgatgacactctcaactttggtaatttgaaggcagtttaattaaggcaggtgtagaaaaacaatacggtaaagtgtactactttggggctagtaacagcgggatgctgtacccatccctaggccatgggaggaagaagccacggtaggaagcagttataagaattgtgtggcagaaagaggtgagtggagaggacagtgtataggagggcagcctgctgttaggtgttgcagccactctcctccctccctctgacctttgctcatgcaaccaccggctgactccaactggaaccagagggcaggggcctgttgaggcaggcaaacctcccttgtcccagagcagtctaagaggaggttgaagaatggctgtggagggaccaatggcagatgttcagcacacacactttatctactcttcagcacttttcattatttcaaacctaacctatgaagattgccccatatctctatatagagaacatccatattctctgtcatggcagcatattatttcttgcatgtgttacactttttaaacagtcctttattgtatactttatattattacaagtcctggcttaaagattcttcgtgtgcaccttactaggtgcacctcattacacggcaaacagatcaattaagagtgtgtgtgaaaactacaataccataaacaaataataaaatactgaggtacaagggacctaatacaaccccgtcattttacaaactagcttgcttacagttgcactttctactacaatgacaaggactagaatacaggccaccaaatttctagtccaggggtccttctactacaataatctattttcatgattggtagaaatttcatttttgagaaactctttgacaaagaagcttagttttgtggtcatctataagagactccattgagatggtcggtattttggaattc

SEQ ID NO: 28985 - DNA, 1931 bp, Homo Sapiens
gaattcctgacacgctcctgggtcgtaggcacaggagtgggggccaaagcatggagaatcaagagaaggcgagtatcgcgggccacatgttcgacgtagtcgtgatcggaggtggcatttcaggactatctgctgccaaactcttgactgaatatggcgttagtgttttggttttagaagctcgggacagggttggaggaagaacatatactataaggaatgagcatgttgattacgtagatgttggtggagcttatgtgggaccaacccaaaacagaatcttacgcttgtctaaggagctgggcatagagacttacaaagtgaatgtcagtgagcgtctcgttcaatatgtcaaggggaaaacatatccatttcggggcgcctttccaccagtatggaatcccattgcatatttggattacaataatctgtggaggacaatagataacatggggaaggagattccaactgatgcaccctgggaggctcaacatgctgacaaatgggacaaaatgaccatgaaagagctcattgacaaaatctgctggacaaagactgctaggcggtttgcttatctttttgtgaatatcaatgtgacctctgagcctcacgaagtgtctgccctgtggttcttgtggtatgtgaagcagtgcgggggcaccactcggatattctctgtcaccaatggtggccaggaacggaagtttgtaggtggatctggtcaagtgagcgaacggataatggacctcctcggagaccaagtgaagctgaaccatcctgtcactcacgttgaccagtcaagtgacaacatcatcatagagacgctgaaccatgaacattatgagtgcaaatacgtaattaatgcgatccctccgaccttgactgccaagattcacttcagaccagagcttccagcagagagaaaccagttaattcagcgtcttccaatgggagctgtcattaagtgcatgatgtattacaaggaggccttctggaagaagaaggattactgtggctgcatgatcattgaagatgaagatgctccaatttcaataaccttggatgacaccaagccagatgggtcactgcctgccatcatgggcttcattcttgcccggaaagctgatcgacttgctaagctacataaggaaataaggaagaagaaaatctgtgagctctatgccaaagtgctgggatcccaagaagctttacatccagtgcattatgaagagaagaactggtgtgaggagcagtactctgggggctgctacacggcctacttccctcctgggatcatgactcaatatggaagggtgattcgtcaacccgtgggcaggattttctttgcgggcacagagactgccacaaagtggagcggctacatggaaggggcagttgaggctggagaacgagcagctagggaggtcttaaatggtctcgggaaggtgaccgagaaagacatctgggtacaagaacctgaatcaaaggacgttccagcggtagaaatcacccacaccttctgggaaaggaacctgccctctgtttctggcctgctgaagatcattggattttccacatcagtaactgccctggggtttgtgctgtacaaatacaagctcctgccacggtcttgaagttctgttcttatgctctctgctcactggttttcaataccaccaagaggaaaatattgacaagtttaaaggctgtgtcattgggccatgtttaagtgtactggatttaactacctttggcttaattccaatcattgttaaagtaaaaacaattcaaagaatcacctaattaatttcagtaagatcaagctccatcttatttgtcagtgtagatcaactcatgttaattgatagaataaagccttgtgatcactttctgaaattcacaaagttaaacgtgatgtgctcatcagaaac

SEQ ID NO: 28986 - DNA, 331 bp, Homo Sapiens
tccgcttacttcttagtgggccccatgctgattgagtttaacatgcctgtggacctggagctcgtggcaaagcagaacccaaatgtgaagatgggcggccgctatgcccccagggactgcgtctctcctcacaaggtggccatcatcattccattccgcaaccggcaggagcacctcaagtactggctatattatttgcacccagtcctgcagcgccagcagctggactatggcatctatggcatctatgttatcaaccaggtgaggcctgggaaggtggatgagagagggtgtgtgtgcatgcagatgtgtatcagatgtgtgtgtatga

SEQ ID NO: 28987 - DNA, 4626 bp, Homo Sapiens
gaattcccctccatcctgcgtccatggccaccgctgcgactgaggagcccttcccttttcacggtctcctgccgaagaaggagaccggagccgcctccttcctctgccgctacccggagtatgatgggcggggggtgctcatcgcagtcctggacacgggggtcgacccgggggctccgggcatgcaggttacaactgatggaaaaccaaaaatcgttgatatcattgatacaacaggaagtggcgatgtgaatactgctacagaagtagagccaaaggatggtgagattgttggcctttcaggaagagtgcttaagattcctgcaagctggacaaatccctcaggcaaatatcatattggcataaaaaatggctatgacttctatcctaaggcactcaaggaaaggatacagaaagaacggaaggaaaaaatctgggaccctgttcacagagtggcccttgcagaagcctgtagaaaacaggaagaatttgatgttgccaacaacggctcttctcaagcaaataaactaatcaaggaggaacttcaaagtcaagtggaattgctaaattcttttgagaagaaatacagcgatcctggccctgtatatgactgcttggtatggcatgatggcgaagtctggagagcctgcattgattctaatgaagatggggacttgagtaaatctaccgtgttgagaaactacaaagaagcccaagaatatggctcttttggcacagctgagatgttgaattactccgttaatatatacgatgatagaaacctgctctccattgtgaccagtggaggagctcatgggacacatgtagctagtatagctgctggacactttccagaagaacctgaacggaatggggtagctcctggtgctcaaattctttccatcaagattggtgatacaagactaagcacaatggaaacaggcacaggcctcataagagctatgatagaagttataaatcataagtgtgatcttgtcaactacagttacggagaagcaactcactggccaaattctgggagaatttgtgaagtaattaatgaagcagtatggaagcataatataatttatgtttcaagtgctggaaataatggtccatgcctgtctacagttggttgtccaggtggaactacatcaagtgtgataggtgttggtgcttatgtttctcctgatatgatggttgctgagtattcactgagagagaaattacctgcaaatcaatatacttggtcttctagaggacctagtgctgacggggcccttggtgtgagtatcagtgcgccaggaggagccattgcttctgttcctaactggacactgagagggacgcagctgatgaatggaacatctatgtcttcccccaatgcatgtggaggcattgccctgatcctttcaggtctgaaagctaataacattgactacacagttcattcagtcagaagagctctagaaaacactgcagtgaaggctgacaatatagaagtatttgctcaaggacatggtattattcaggttgataaagcctatgactacctcgttcagaatacatcatttgctaataaattaggttttactgttactgttggaaataaccgtggcatctacctccgagatcctgttcaggtggctgcaccttcagatcatggcgttggcattgaacctgtatttccggagaacacagaaaactctgaaaaaatatcccttcagcttcatttagctctgacttcaaattcatcttgggttcagtgtcccagccatttggaactcatgaatcaatgtagacacataaacatacgtgtggatcccaggggcttaagagaaggattgcattatacagaggtatgtggctatgatatagcatcccctaacgcaggtccgctcttcagagttccgatcactgcagttatagcagcaaaagtaaatgaatcatcacattatgatctagcctttacagatgtacactttaaacctggtcaaattcgaaggcattttattgaggttcctgagggtgcaacatgggctgaagtgacagtgtgttcgtgttcttctgaggtgtcagcaaagtttgttctacatgcagtccagcttgtgaagcaaagagcatatcgaagccatgaattctataagttttgttctcttccagagaaaggaacactgactgaagcttttcctgtcctaggtggaaaagcaattgaattttgcattgctcgttggtgggcaagtctcagtgatgtcaacattgattataccatttctttccatgggatagtgtgtactgctcctcagttaaacattcatgcatcggaaggaatcaaccgctttgatgttcagtcctccttgaaatacgaagatctggctccctgcataactttgaagaactgggtccaaacactgcgcccagtgagtgcaaaaacaaaacctttaggatcaagagatgttttgccaaataaccgtcaactttatgagatggtcctgacatataactttcatcaacccaagagtggggaagtaactccaagctgcccactactttgtgaactattatatgaatctgaatttgacagccaactgtggattatttttgaccagaacaaaagacagatgggttcaggcgatgcctatccacatcagtattctttgaaactggagaaaggagattatacaattcgactacagattcgccatgagcaaatcagtgatttggaacgccttaaagaccttccatttattgtttctcatagattgtctaataccttgagcttagatattcatgaaaatcatagttttgcacttctagggaagaagaaatcaagcaatttgacattaccacccaaatataaccagccattctttgttacttccttacctgatgataaaatacctaaaggggcaggacctggatgctatcttgcaggatccttaacattgtcaaagactgaactaggaaagaaagctgatgtaatccctgttcattactacttaatacctccaccaacaaagactaagaatggcagcaaagataaggaaaaagattcagaaaaagagaaagatttaaaagaagagtttactgaagcattacgagatcttaaaattcagtggatgacaaagctggattctagtgacatttataacgaattgaaagaaacatatcctaattatcttcctctgtacgttgcacgacttcatcaattggatgctgaaaaggaacgaatgaaaagacttaatgaaattgttgatgcggcaaatgctgttatttctcatatagatcaaacagccctagcagtttatattgcaatgaagactgatcccaggcctgatgcagctactataaaaaatgacatggacaaacaaaaatccaccctcgtagatgccctttgtaggaaaggttgtgccctggcagaccatcttcttcacacccaggctcaagacggagccatttccactgatgcagaaggaaaggaggaggaaggagaaagtcctttggattctctggcagaaacattttgggaaactactaaatggactgatctctttgacaataaggttttgacatttgcatataaacatgcattagtaaataaaatgtatgggagaggccttaaatttgcaactaaacttgtggaagaaaaaccaacaaaagaaaactggaaaaattgtattcaactgatgaagttacttggatggacccattgtgcatcttttactgaaaactggctccccatcatgtatcctcccgattattgcgtattctaaaataggaaacaagactttaaattttaaaaaaggaagttttatagtgaatgggtataaaaacaaatttgtggcatttttagtctaatgcatgttttcatccactatccagtactgattattaaaatgacatgtatttatcagagaattcactgacgtgtggcttaatacatgtaaatctagacctctgacatcatggtgttttcttaatgcctcacattgctggcacggggatgtgccctgcctgccagcacctaggacttcgagttgggttgcagcttatgacatgcatgataggttttggaaggtaacttttaactgcaaacctataaagtactattttttattttataaatgaacagggttttaacgtgctcaactttaatttttttcaattgtatgaaggccttaaaaaagctacattaagcgtagctaaaattatttattggactaaaaactaacagaacttcatttccagaattttttttttttttttttttttggcaaatgtttacattcaattaaggggaaaaagtagaaccagcacaaatgagtggcagttgctggagcataactgcttcaataaatcttcatcttggggtaattacaggcaagtcattttcacatcctcttgaggttcagagcatcagaatgaactctatgaatacatgtgtaagtgccagacagctgaatctttatcaggtattgtaaagatacacatatgatatgtttattaaaattgaaataatgtaaaacacatgaataaatttgcaaaaccaagatcacagtacaccatatgcactctggtaccttaatttttttttataaataataaaagtgaatattgaagcttctt

SEQ ID NO: 28988 - DNA, 3233 bp, Homo Sapiens
cttgaagtggtttgttgtgcttgaagagaccccatggatgccaccagtcacattgacaacatggaaaacgaacggattccctttgatttaatggataccgtccctgcagaggcactatacgaggcccacttagagaagctgaggaacgaaaggaaaagagttgagatgcgaagggcgtttaaagaaaacctggagacttctcctttcataactcccggaaagccttgggaagaggcccgtagttttattatgaatgaggatttctaccagtggctggaggaatctgtatacacggatatttatggcaaacaccaaaagcaaattatagataaagcaaaggaagaatttcaggagttgcttttggaatattcagaattgttttatgaactggagctggatgctaagcccagcaaggagaagatgggtgttattcaggatgttctgggagaggaacagcgatttaaagccatttacaaaagctccaagcagagcgttgatgcccttattctgaaacacattcattttgtgtaccacccaacaaaggagacatgccccagctgcccagcttgtgtggacgctaagattgagcacttgattagttctcggtttatccggccgtctgaccggaatcagaaaaattcactctctgaccctaacattgatagaatcaacttggttatattgggcaaagacgccttgcccgagagttggccaatggagattagagctctttgtacaaatgatgacaagtatgtgatagatggtaaaatgtatgagctttccctgaggccaatagaggggaatgtcaggcttcctgtgaactctttccagacgccaacatttcagccccacggctgtctctgcctttacaattcaaaggaatcgctatcctatgtagtggaaagtatagagaagagtagagagtccacgctgggccggcgggataatcatttagtccatctcccccttacattaattttggttaacaagagaggagacaccagtggagagactctgcatagcttaatacagcaaggtcaacaaattgctagcaaacttcagtgtgtctttctcgaccctgcttctgctggcattggttacggacgcaacattaatgaaaagcaaatcagtcaagttttgaagggactcctggactctaagcgtaacttaaacctggtcagttctactgctagcatcaaagatttggctgatgttgatctgcgaattgttatgtgtctgatgtgtggagatccttttagtgcagatgatatactttttcctgtccttcagtcccaaacctgtaaatcttcccattgtggaagcaacaactctgttttacttgaactaccaatcggactgcacaagaagcggattgaactgtctgttctttcataccattcctcctttagcatcagaaagagccggttggttcatgggtacattgttttttattcagccaaacgtaaggcctctttggctatgttacgtgcctttctttgtgaagtgcaggatattatccctattcagcttgtagcactcactgatggcgctgtagatgtcctggacaatgacttaagtagggaacagctaactgagggggaggagattgctcaagaaattgacggaaggttcacaagcatcccctgtagccaaccccagcataaacttgagatctttcacccattttttaaagatgtggtggaaaaaaagaacataatcgaggctactcatatgtacgataatgctgccgaggcctgtagcaccaccgaagaggtgtttaactccccccgggcaggatcaccgctctgcaactcaaacctgcaggattcagaagaagatatcgagccatcttacagcctgtttcgagaagacacatcactgccttctctgtccaaagaccattctaagctctctatggaactggagggaaatgatgggctgtctttcattatgagcaattttgagagtaaactgaacaacaaagtacctccgccagtcaaaccaaagcctcctgtccattttgaaattacaaagggggatctatcttatttagaccaaggccatagggatggacagaggaagtctgtgtcttctagcccctggctgcctcaggatgggtttgatccttctgactatgctgaacccatggatgctgtggtgaagccaaggaatgaagaagaaaacatatactccgtgccccatgacagcacccaaggcaaaatcatcaccattcggaatatcaacaaagcccagtccaacggcagcgggaatggttctgacagtgaaatggacaccagctctctagagcgagggcgcaaggtttccatcgtgagcaagccagtgctgtacaggacgagatgcacccggctgggcggtttgctagttaccggaccagcttcagcgtggggagtgatgatgagctggggcccatccggaagaaagaggaggatcaggcatcccagggttataaaggggacaatgctgtcattccatacgaaacagacgaagacccgcggaggaggaatattcttcgcagcctaaggaggaacactaagaaaccaaagcccaaaccccggccatccatcacaaaggccaacctgggagagtaactattttggggtgcccttaacaactgtcgtgactccagagaagccgatccccatttttattgaaagatgtattgagtacattgaagccacaggactgagcacggaaggcatctaccgggtcagcgggaacaagtctgagatggagagtctgcagagacagtttgatcaagaccacaacctggacctggcagagaaagactttacggtgaataccgtggctggtgccatgaagagctttttctcagaactgcctgaccccctggtccgtataacatgcagatcgacttggtggaagcacacaaaatcaacgaccgggagcagaagttgcatgcccttaaggaggtattaaagaaatttccaaaggaaaaccacgaagtcttcaagtatgtcatctctcacctaaacaaggtcagccacaacaacaaggtgaatctcatgaccagcgagaacctctccatctgcttctggcccaccttgatgagacctgatttcagcactatggacgccctcacagccacgcgcacctaccagacaatcattgaactctttatccagcagtgccccttcttcttctacaatcggcccatcaccgagcccccggcgccaggcccagctcccggaatt

SEQ ID NO: 28989 - DNA, 10388 bp, Homo Sapiens
  misc_feature (8781)..(8781): n is a, c, g, or t
  misc_feature (8817)..(8817): n is a, c, g, or t
  misc_feature (8860)..(8860): n is a, c, g, or t
  misc_feature (8888)..(8888): n is a, c, g, or t
  misc_feature (8898)..(8898): n is a, c, g, or t
  misc_feature (8929)..(8929): n is a, c, g, or t
  misc_feature (8961)..(8961): n is a, c, g, or t
  misc_feature (8994)..(8994): n is a, c, g, or t
  misc_feature (9094)..(9094): n is a, c, g, or t
  misc_feature (9352)..(9352): n is a, c, g, or t
  misc_feature (9458)..(9458): n is a, c, g, or t
  misc_feature (9524)..(9524): n is a, c, g, or t
  misc_feature (9576)..(9576): n is a, c, g, or t
  misc_feature (9667)..(9667): n is a, c, g, or t
  misc_feature (9670)..(9670): n is a, c, g, or t
  misc_feature (9807)..(9807): n is a, c, g, or t
  misc_feature (9832)..(9832): n is a, c, g, or t
  misc_feature (9991)..(9992): n is a, c, g, or t
  misc_feature (10163)..(10163): n is a, c, g, or t
  misc_feature (10210)..(10210): n is a, c, g, or t
  misc_feature (10301)..(10301): n is a, c, g, or t
  misc_feature (10325)..(10325): n is a, c, g, or t
  misc_feature (10363)..(10363): n is a, c, g, or t
  misc_feature (10366)..(10366): n is a, c, g, or t
attgaggactcggaaatgaggtccaagggtagccaaggatggctgcagcttcatatgatcagttgttaaagcaagttgaggcactgaagatggagaactcaaatcttcgacaagagctagaagataattccaatcatcttacaaaactggaaactgaggcatctaatatgaaggaagtacttaaacaactacaaggaagtattgaagatgaagctatggcttcttctggacagattgatttattagagcgtcttaaagagcttaacttagatagcagtaatttccctggagtaaaactgcggtcaaaaatgtccctccgttcttatggaagccgggaaggatctgtatcaagccgttctggagagtgcagtcctgttcctatgggttcatttccaagaagagggtttgtaaatggaagcagagaaagtactggatatttagaagaacttgagaaagagaggtcattgcttcttgctgatcttgacaaagaagaaaaggaaaaagactggtattacgctcaacttcagaatctcactaaaagaatagatagtcttcctttaactgaaaatttttccttacaaacagatttgaccagaaggcaattggaatatgaagcaaggcaaatcagagttgcgatggaagaacaactaggtacctgccaggatatggaaaaacgagcacagcgaagaatagccagaattcagcaaatcgaaaaggacatacttcgtatacgacagcttttacagtcccaagcaacagaagcagagaggtcatctcagaacaagcatgaaaccggctcacatgatgctgagcggcagaatgaaggtcaaggagtgggagaaatcaacatggcaacttctggtaatggtcagggttcaactacacgaatggaccatgaaacagccagtgttttgagttctagtagcacacactctgcacctcgaaggctgacaagtcatctgggaaccaaggtggaaatggtgtattcattgttgtcaatgcttggtactcatgataaggatgatatgtcgcgaactttgctagctatgtctagctcccaagacagctgtatatccatgcgacagtctggatgtcttcctctcctcatccagcttttacatggcaatgacaaagactctgtattgttgggaaattcccggggcagtaaagaggctcgggccagggccagtgcagcactccacaacatcattcactcacagcctgatgacaagagaggcaggcgtgaaatccgagtccttcatcttttggaacagatacgcgcttactgtgaaacctgttgggagtggcaggaagctcatgaaccaggcatggaccaggacaaaaatccaatgccagctcctgttgaacatcagatctgtcctgctgtgtgtgttctaatgaaactttcatttgatgaagagcatagacatgcaatgaatgaactagggggactacaggccattgcagaattattgcaagtggactgtgaaatgtatgggcttactaatgaccactacagtattacactaagacgatatgctggaatggctttgacaaacttgacttttggagatgtagccaacaaggctacgctatgctctatgaaaggctgcatgagagcacttgtggcccaactaaaatctgaaagtgaagacttacagcaggttattgcaagtgttttgaggaatttgtcttggcgagcagatgtaaatagtaaaaagacgttgcgagaagttggaagtgtgaaagcattgatggaatgtgctttagaagttaaaaaggaatcaaccctcaaaagcgtattgagtgccttatggaatttgtcagcacattgcactgagaataaagctgatatatgtgctgtagatggtgcacttgcatttttggttggcactcttacttaccggagccagacaaacactttagccattattgaaagtggaggtgggatattacggaatgtgtccagcttgatagctacaaatgaggaccacaggcaaatcctaagagagaacaactgtctacaaactttattacaacacttaaaatctcatagtttgacaatagtcagtaatgcatgtggaactttgtggaatctctcagcaagaaatcctaaagaccaggaagcattatgggacatgggggcagttagcatgctcaagaacctcattcattcaaagcacaaaatgattgctatgggaagtgctgcagctttaaggaatctcatggcaaataggcctgcgaagtacaaggatgccaatattatgtctcctggctcaagcttgccatctcttcatgttaggaaacaaaaagccctagaagcagaattagatgctcagcacttatcagaaacttttgacaatatagacaatttaagtcccaaggcatctcatcgtagtaagcagagacacaagcaaagtctctatggtgattatgtttttgacaccaatcgacatgatgataataggtcagacaattttaatactggcaacatgactgtcctttcaccatatttgaatactacagtgttacccagctcctcttcatcaagaggaagcttagatagttctcgttctgaaaaagatagaagtttggagagagaacgcggaattggtctaggcaactaccatccagcaacagaaaatccaggaacttcttcaaagcgaggtttgcagatctccaccactgcagcccagattgccaaagtcatggaagaagtgtcagccattcatacctctcaggaagacagaagttctgggtctaccactgaattacattgtgtgacagatgagagaaatgcacttagaagaagctctgctgcccatacacattcaaacacttacaatttcactaagtcggaaaattcaaataggacatgttctatgccttatgccaaattagaatacaagagatcttcaaatgatagtttaaatagtgtcagtagtaatgatggttatggtaaaagaggtcaaatgaaaccctcgattgaatcctattctgaagatgatgaaagtaagttttgcagttatggtcaatacccagccgacctagcccataaaatacatagtgcaaatcatatggatgataatgatggagaactagatacaccaataaattatagtcttaaatattcagatgagcagttgaactctggaaggcaaagtccttcacagaatgaaagatgggcaagacccaaacacataatagaagatgaaataaaacaaagtgagcaaagacaatcaaggaatcaaagtacaacttatcctgtttatactgagagcactgatgataaacacctcaagttccaaccacattttggacagcaggaatgtgtttctccatacaggtcacggggagccaatggttcagaaacaaatcgagtgggttctaatcatggaattaatcaaaatgtaagccagtctttgtgtcaagaagatgactatgaagatgataagcctaccaattatagtgaacgttactctgaagaagaacagcatgaagaagaagagagaccaacaaattatagcataaaatataatgaagagaaacgtcatgtggatcagcctattgattatagtttaaaatatgccacagatattccttcatcacagaaacagtcattttcattctcaaagagttcatctggacaaagcagtaaaaccgaacatatgtcttcaagcagtgagaatacgtccacaccttcatctaatgccaagaggcagaatcagctccatccaagttctgcacagagtagaagtggtcagcctcaaaaggctgccacttgcaaagtttcttctattaaccaagaaacaatacagacttattgtgtagaagatactccaatatgtttttcaagatgtagttcattatcatctttgtcatcagctgaagatgaaataggatgtaatcagacgacacaggaagcagattctgctaataccctgcaaatagcagaaataaaaggaaagattggaactaggtcagctgaagatcctgtgagcgaagttcccagcagtgtgcacagcaccctagaaaccaaatccagcagactgcagggttctagtttatcttcagaatcagccaggcacaaagctgttgaatttccttcaggagcgaaatctccctccaaaagtggtgctcagacacccaaaagtccacctgaacactatgttcaggagaccccactcatgtttagcagatgtacttctgtcagttcacttgatagttttgagagtcgttcgattgccagctccgttcagagtgaaccatgcagtggaatggtaagtggcattataagccccagtgatcttccagatagccctggacaaaccatgccaccaagcagaagtaaaacacctccaccacctcctcaaacagctcaaaccaagcgagaagtacctaaaaataaagcacctactgctgaaaagagagagagtggacctaagcaagctgcagtaaatgctgcagttcagagggtccaggttcttccagatgctgatactttattacattttgccacagaaagtactccagatggattttcttgttcatccagcctgagtgctctgagcctcgatgagccatttatacagaaagatgtggaattaagaataatgcctccagttcaggaaaatgacaatgggaatgaaacagaatcagagcagcctaaagaatcaaatgaaaaccaagagaaagaggcagaaaaaactattgattctgaaaaggacctattagatgattcagatgatgatgatattgaaatactagaagaatgtattatttctgccatgccaacaaagtcatcacgtaaaggcaaaaagccagcccagactgcttcaaaattacctccacctgtggcaaggaaaccaagtcagctgcctgtgtacaaacttctaccatcacaaaacaggttgcaaccccaaaagcatgttagttttacaccgggggatgatatgccacgggtgtattgtgttgaagggacacctataaacttttccacagctacatctctaagtgatctaacaatcgaatcccctccaaatgagttagctgctggagaaggagttagaggaggagcacagtcaggtgaatttgaaaaacgagataccattcctacagaaggcagaagtacagatgaggctcaaggaggaaaaacctcatctgtaaccatacctgaattggatgacaataaagcagaggaaggtgatattcttgcagaatgcattaattctgctatgcccaaagggaaaagtcacaagcctttccgtgtgaaaaagataatggaccaggtccagcaagcatctgcgtcgtcttctgcacccaacaaaaatcagttagatggtaagaaaaagaaaccaacttcaccagtaaaacctataccacaaaatactgaatataggacacgtgtaagaaaaaatgcagactcaaaaaataatttaaatgctgagagagttttctcagacaacaaagattcaaagaaacagaatttgaaaaataattccaaggacttcaatgataagctcccaaataatgaagatagagtcagaggaagttttgcttttgattcacctcatcattacacgcctattgaaggaactccttactgtttttcacgaaatgattctttgagttctctagattttgatgatgatgatgttgacctttccagggaaaaggctgaattaagaaaggcaaaagaaaataaggaatcagaggctaaagttaccagccacacagaactaacctccaaccaacaatcagctaataagacacaagctattgcaaagcagccaataaatcgaggtcagcctaaacccatacttcagaaacaatccacttttccccagtcatccaaagacataccagacagaggggcagcaactgatgaaaagttacagaattttgctattgaaaatactccagtttgcttttctcataattcctctctgagttctctcagtgacattgaccaagaaaacaacaataaagaaaatgaacctatcaaagagactgagccccctgactcacagggagaaccaagtaaacctcaagcatcaggctatgctcctaaatcatttcatgttgaagataccccagtttgtttctcaagaaacagttctctcagttctcttagtattgactctgaagatgacctgttgcaggaatgtataagctccgcaatgccaaaaaagaaaaagccttcaagactcaagggtgataatgaaaaacatagtcccagaaatatgggtggcatattaggtgaagatctgacacttgatttgaaagatatacagagaccagattcagaacatggtctatcccctgattcagaaaattttgattggaaagctattcaggaaggtgcaaattccatagtaagtagtttacatcaagctgctgctgctgcatgtttatctagacaagcttcgtctgattcagattccatcctttccctgaaatcaggaatctctctgggatcaccatttcatcttacacctgatcaagaagaaaaaccctttacaagtaataaaggcccacgaattctaaaaccaggggagaaaagtacattggaaactaaaaagatagaatctgaaagtaaaggaatcaaaggaggaaaaaaagtttataaaagtttgattactggaaaagttcgatctaattcagaaatttcaggccaaatgaaacagccccttcaagcaaacatgccttcaatctctcgaggcaggacaatgattcatattccaggagttcgaaatagctcctcaagtacaagtcctgtttctaaaaaaggcccaccccttaagactccagcctccaaaagccctagtgaaggtcaaacagccaccacttctcctagaggagccaagccatctgtgaaatcagaattaagccctgttgccaggcagacatcccaaataggtgggtcaagtaaagcaccttctagatcaggatctagagattcgaccccttcaagacctgcccagcaaccattaagtagacctatacagtctcctggccgaaactcaatttcccctggtagaaatggaataagtcctcctaacaaattatctcaacttccaaggacatcatcccctagtactgcttcaactaagtcctcaggttctggaaaaatgtcatatacatctccaggtagacagatgagccaacagaaccttaccaaacaaacaggtttatccaagaatgccagtagtattccaagaagtgagtctgcctccaaaggactaaatcagatgaataatggtaatggagccaataaaaaggtagaactttctagaatgtcttcaactaaatcaagtggaagtgaatctgatagatcagaaagacctgtattagtacgccagtcaactttcatcaaagaagctccaagcccaaccttaagaagaaaattggaggaatctgcttcatttgaatctctttctccatcatctagaccagcttctcccactaggtcccaggcacaaactccagttttaagtccttcccttcctgatatgtctctatccacacattcgtctgttcaggctggtggatggcgaaaactcccacctaatctcagtcccactatagagtataatgatggaagaccagcaaagcgccatgatattgcacggtctcattctgaaagtccttctagacttccaatcaataggtcaggaacctggaaacgtgagcacagcaaacattcatcatcccttcctcgagtaagcacttggagaagaactggaagttcatcttcaattctttctgcttcatcagaatccagtgaaaaagcaaaaagtgaggatgaaaaacatgtgaactctatttcaggaaccaaacaaagtaaagaaaaccaagtatccgcaaaaggaacatggagaaaaataaaagaaaatgaattttctcccacaaatagtacttctcagaccgtttcctcaggtgctacaaatggtgctgaatcaaagactctaatttatcaaatggcacctgctgtttctaaaacagaggatgtttgggtgagaattgaggactgtcccattaacaatcctagatctggaagatctcccacaggtaatactcccccggtgattgacagtgtttcagaaaaggcaaatccaaacattaaagattcaaaagataatcaggcaaaacaaaatgtgggtaatggcagtgttcccatgcgtaccgtgggtttggaaaatcgcctgacctcctttattcaggtggatgcccctgaccaaaaaggaactgagataaaaccaggacaaaataatcctgtccctgtatcagagactaatgaaagtcctatagtggaacgtaccccattcagttctagcagctcaagcaaacacagttcacctagtgggactgttgctgccagagtgactccttttaattacaacccaagccctaggaaaagcagcgcagatagcacttcagctcggccatctcagatcccaactccagtgaataacaacacaaagaagcgagattccaaaactgacagcacagaatccagtggaacccaaagtcctaagcgccattctgggtcttaccttgtgacatctgtttaaaagagaggaagaatgaaactaagaaaattctatgttaattacaactgctatatagacattttgtttcaaatgaaactttaaaagactgaaaaattttgtaaataggtttgattcttgttagagggtttttgttctggaagccatatttgatagtatactttgtcttcactggtcttattttgggaggcactctcttgatggttaggcnaaaaatagyaaagccaagtatgtttgtacagtatgnttacatgtatttaaagtagcatcccatcccaacttcccttaantattgcttgtcctaaaataatgaacacnacagataggnaatatgatatattgctgttatcaatcattcnagattataaactgactaaacttacatcagggnaaaattggtatttatgcaaaaaaaaaatgtttntgtccttgtgagtccatctaacatcataattaatcatgtggctgtgaaattcacagtaatatggttcccgatgaacaagtttacccagcctgtttgcttnactgcatgaatgaaactgatggttcaatttcagaagtaatgattaacagttatgtggtcacatgatgtgcatagagatagctacagtgtaataatttacactattttgtgctccaaacaaaacaaaaatctgtgtaactgtaaaacattgaatgaaactattttacctgaactagattttatctgaaagtaggtagaatttttgctatgctgtaatttgttgtatattctggtatttgaggtgagatggctgctcttnattaatgagacatgaattgtgtctcaacagaaactaaatgaacatttcagaataaattattgctgtatgtaaactgttactgaaattggtatttgtttgaagggtnttgtttcacatttgtattaattaattgtttaaaatgcctcttttaaaagcttatataaattttttncttcagcttctatgcattaagagtaaaattcctcttactgtaataaaaacanttgaagaagactgttgccacttaaccattccatgcgttggcacttatctattcctgaaattcttttatgtgattagctcatcttgattttnaanatttttccacttaaacttttttttcttactccactggagctcagtaaaagtaaattcatgtaatagcaatgcaagcagcctagcacagactaagcattgagcataataggcccacataatttcctctttcttaatantatagaaattctgtacttgaaattnattcttagacattgcagtctcttcgaggctttacagtgtaaactgtcttgccccttcatcttcttgttgcaactgggtctgacatgaacactttttatcaccctgtatgttagggcaagatctcagcagtgaagtataatcagactttgccatgctcannaaattcaaatcacatggaactttagaggtagatttaatacgattaagatattcagaagtatattttagaatccctgcctgttaaggaaactttatttgtggtaggtacagttctggggtacatgttaagtgtccccttatacagtggagggaagtcttccttcctgaaggnaaataaactgacacttattaactaagataatttacttaatatatctnccctgatttgttttaaaagatcagagggtgactgatgatacatgcatacatatttgttgaataaatgaaaatttatttttagtgataagantcatacactctgtatttggggagngaaaacctttttaagcatggtggggcactcagataggngtnaatacacctacctggtggtcat

SEQ ID NO: 28990 - DNA, 3789 bp, Homo Sapiens
cccagagccgcctccccctgttgctggcatcccgagcttcctcccttgccagccaggacgctgccgacttgtctttgcccgctgctccgcagacggggctgcaaagctgcaactaatggtgttggcctccctgcccacctgtggaagcaactgcgctgattgatgcgccacagacttttttcccctcgacctcgccggcgtaccctcccacagatccagcatcacccagtgaatgtacattagggtggtttcccccccagcttcgggctttgtttgggtttgattgtgtttggctcttcgctaagctgatttatgcagcagaagccccaccggctggagagaaacaaaagctcttttctttgtcccggagcaggctgcggagcccttgcagagccctctctccagtcgccgccgggcccttggccgtcgaaggaggtgcttctcgcggagaccgcgggacccgccgtgccgagccgggagggccgtaggggccctgagatgccgagcggtgcccgggcccgcttacctgcaccgcttgctccgagccgcggggtccgcctgctaggcctgcggaaaacgtcctagcgacactcgcccgcgggccccgaggtcgcccgggaggccgagcccgcgtccggaaggcagccaggcggcgggcgcggggcgggctgttttgcattatgtgcggctcggccctggctttttttaccgctgcatttgtctgcctgcaaaacgaccggcgaggtcccgcctcgttcctctgggcagcctgggtgttttcacttgttcttggactgggccaaggtgaagacaatagatgtgcatcttcaaatgcagcatcctgtgccaggtgccttgcgctgggtccagaatgtggatggtgtgttcaagaggatttcatttcaggtggatcaagaagtgaacgttgtgatattgtttccaatttaataagcaaaggctgctcagttgattcaatagaatacccatctgtgcatgttataatacccactgaaaatgaaattaatacccaggtgacaccaggagaagtgtctatccagctgcgtccaggagccgaagctaattttatgctgaaagttcatcctctgaagaaatatcctgtggatctttattatcttgttgatgtctcagcatcaatgcacaataatatagaaaaattaaattccgttggaaacgatttatctagaaaaatggcatttttctcccgtgactttcgtcttggatttggctcatacgttgataaaacagtttcaccatacattagcatccaccccgaaaggattcataatcaatgcagtgactacaatttagactgcatgcctccccatggatacatccatgtgctgtctttgacagagaacatcactgagtttgagaaagcagttcatagacagaagatctctggaaacatagatacaccagaaggaggttttgacgccatgcttcaggcagctgtctgtgaaagtcatatcggatggcgaaaagaggctaaaagattgctgctggtgatgacagatcagacgtctcatctcgctcttgatagcaaattggcaggcatagtggtgcccaatgacggaaactgtcatctgaaaaacaacgtctacgtcaaatcgacaaccatggaacacccctcactaggccaactttcagagaaattaatagacaacaacattaatgtcatctttgcagttcaaggaaaacaatttcattggtataaggatcttctacccctcttgccaggcaccattgctggtgaaatagaatcaaaggctgcaaacctcaataatttggtagtggaagcctatcagaagctcatttcagaagtgaaagttcaggtggaaaaccaggtacaaggcatctattttaacattaccgccatctgtccagatgggtccagaaagccaggcatggaaggatgcagaaacgtgacgagcaatgatgaagttcttttcaatgtaacagttacaatgaaaaaatgtgatgtcacaggaggaaaaaactatgcaataatcaaacctattggttttaatgaaaccgctaaaattcatatacacagaaactgcagctgtcagtgtgaggacaacagaggacctaaaggaaagtgtgtagatgaaacttttctagattccaagtgtttccagtgtgatgagaataaatgtcattttgatgaagatcagttttcttctgagagttgcaagtcacacaaggatcagcctgtttgcagtggtcgaggagtttgtgtttgtgggaaatgttcatgtcacaaaattaagcttggaaaagtgtatggaaaatactgtgaaaaggatgacttttcttgtccatatcaccatggaaatctgtgtgctgggcatggagagtgtgaagcaggcagatgccaatgcttcagtggctgggaaggtgatcgatgccagtgcccttcagcagcagcccagcactgtgtcaattcaaagggccaagtgtgcagtggaagaggcacgtgtgtgtgtggaaggtgtgagtgcaccgatcccaggagcatcggccgcttctgtgaacactgccccacctgttatacagcctgcaaggaaaactggaattgtatgcaatgccttcaccctcacaatttgtctcaggctatacttgatcagtgcaaaacctcatgtgctctcatggaacaacagcattatgtcgaccaaacttcagaatgtttctccagcccaagctacttgagaatatttttcatcattttcatagttacattcttgattgggttgcttaaagtcctgatcattagacaggtgatactacaatggaatagtaataaaattaagtcctcatcagattacagagtgtcagcctcaaaaaaggataagttgattctgcaaagtgtttgcacaagagcagtcacctaccgacgtgagaagcctgaagaaataaaaatggatatcagcaaattaaatgctcatgaaactttcaggtgcaacttctaaaaaaagatttttaaacacttaatgggaaactggaattgttaataattgctcctaaagattataattttaaaagtcacaggaggagacaaattgctcacggtcatgccagttgctggttgtacactcgaacgaagactgacaagtatcctcatcatgatgtgactcacatagctgctgactttttcagagaaaaatgtgtcttactactgtttgagactagtgtcgttgtagcactttactgtaatatataacttatttagatcagcatagaatgtagatcctctgaagagcactgattacactttacaggtacctgttatccctacgcttcccagagagaacaatgctgtgagagagtttagcattgtgtcactacaagggtacagtaatccctgcactggacatgtgaggaaaaaaataatctggcaagtatattctaaggttgccaaacacttcaacagttggtggttgaatagacaagaacagctagatgaataaatgattcgtgtttcactctttcaagaggtgaacagatacaaccttaatcttaaaagattattgctttttaaagtgtgtagttttatgcatgtgtgtttatggtttgcttatttttgcaagatggatactaattccagcattctctcctctttgcctttatgttttgttttcttttttacaggataagtttatgtatgtcacagatgactggattaattaagtgctaagttactactgccataaaaaactaataatacaatgtcactttatcagaatactagttttaaaagctgaatgttaa

SEQ ID NO: 28991 - DNA, 7332 bp, Homo Sapiens
  misc_feature (5288)..(5288): n is a, c, g, or t
  misc_feature (5359)..(5359): n is a, c, g, or t
atgccgccgctcctggcgcccctgctctgcctggcgctgctgcccgcgctcgccgcacgaggcccgcgatgctcccagcccggtgagacctgcctgaatggcgggaagtgtgaagcggccaatggcacggaggcctgcgtctgtggcggggccttcgtgggcccgcgatgccaggaccccaacccgtgcctcagcaccccctgcaagaacgccgggacatgccacgtggtggaccgcagaggcgtggcagactatgcctgcagctgtgccctgggcttctctgggcccctctgcctgacacccctggacaacgcctgcctcaccaacccctgccgcaacgggggcacctgcgacctgctcacgctgacggagtacaagtgccgctgcccgcccggctggtcagggaaatcgtgccagcaggctgacccgtgcgcctccaacccctgcgccaacggtggccagtgcctgcccttcgaggcctcctacatctgccactgcccacccagcttccatggccccacctgccggcaggatgtcaacgagtgtggccagaagcccaggctttgccgccacggaggcacctgccacaacgaggtcggctcctaccgctgcgtctgccgcgccacccacactggccccaactgcgagcggccctacgtgccctgcagcccctcgccctgccagaacgggggcacctgccgccccacgggcgacgtcacccacgagtgtgcctgcctgccaggcttcaccggccagaactgtgaggaaaatatcgacgattgtccaggaaacaactgcaagaacgggggtgcctgtgtggacggcgtgaacacctacaactgcccgtgcccgccagagtggacaggtcagtactgtaccgaggatgtggacgagtgccagctgatgccaaatgcctgccagaacggcgggacctgccacaacacccacggtggctacaactgcgtgtgtgtcaacggctggactggtgaggactgcagcgagaacattgatgactgtgccagcgccgcctgcttccacggcgccacctgccatgaccgtgtggcctccttttactgcgagtgtccccatggccgcacaggtctgctgtgccacctcaacgacgcatgcatcagcaacccctgtaacgagggctccaactgcgacaccaaccctgtcaatggcaaggccatctgcacctgcccctcggggtacacgggcccggcctgcagccaggacgtggatgagtgctcgctgggtgccaacccctgcgagcatgcgggcaagtgcatcaacacgctgggctccttcgagtgccagtgtctgcagggctacacgggcccccgatgcgagatcgacgtcaacgagtgcgtctcgaacccgtgccagaacgacgccacctgcctggaccagattggggagttccagtgcatgtgcatgcccggctacgagggtgtgcactgcgaggtcaacacagacgagtgtgccagcagcccctgcctgcacaatggccgctgcctggacaagatcaatgagttccagtgcgagtgccccacgggcttcactgggcatctgtgccagtacgatgtggacgagtgtgccagcaccccctgcaagaatggtgccaagtgcctggacggacccaacacttacacctgtgtgtgcacggaagggtacacggggacgcactgcgaggtggacatcgatgagtgcgaccccgacccctgccactacggctcctgcaaggacggcgtcgccaccttcacctgcctctgccgcccaggctacacgggccaccactgcgagaccaacatcaacgagtgctccagccagccctgccgcctacggggcacctgccaggacccggacaacgcctacctctgcttctgcctgaaggggaccacaggacccaactgcgagatcaacctggatgactgtgccagcagcccctgcgactcgggcacctgtctggacaagatcgatggctacgagtgtgcctgtgagccgggctacacagggagcatgtgtaacagcaacatcgatgagtgtgcgggcaacccctgccacaacgggggcacctgcgaggacggcatcaatggcttcacctgccgctgccccgagggctaccacgaccccacctgcctgtctgaggtcaatgagtgcaacagcaacccctgcgtccacggggcctgccgggacagcctcaacgggtacaagtgcgactgtgaccctgggtggagtgggaccaactgtgacatcaacaacaacgagtgtgaatccaacccttgtgtcaacggcggcacctgcaaagacatgaccagtggcatcgtgtgcacctgccgggagggcttcagcggtcccaactgccagaccaacatcaacgagtgtgcgtccaacccatgtctgaacaagggcacgtgtattgacgacgttgccgggtacaagtgcaactgcctgctgccctacacaggtgccacgtgtgaggtggtgctggccccgtgtgcccccagcccctgcagaaacggcggggagtgcaggcaatccgaggactatgagagcttctcctgtgtctgccccacggctggggccaaagggcagacctgtgaggtcgacatcaacgagtgcgttctgagcccgtgccggcacggcgcatcctgccagaacacccacggcgsstaccgctgccactgccaggccggctacagtgggcgcaactgcgagaccgacatcgacgactgccggcccaacccgtgtcacaacgggggctcctgcacagacggcatcaacacggccttctgcgactgcctgcccggcttccggggcactttctgtgaggaggacatcaacgagtgtgccagtgacccctgccgcaacggggccaactgcacggactgcgtggacagctacacgtgcacctgccccgcaggcttcagcgggatccactgtgagaacaacacgcctgactgcacagagagctcctgcttcaacggtggcacctgcgtggacggcatcaactcgttcacctgcctgtgtccacccggcttcacgggcagctactgccagcacgtagtcaatgagtgcgactcacgaccctgcctgctaggcggcacctgtcaggacggtcgcggtctccacaggtgcacctgcccccagggctacactggccccaactgccagaaccttgtgcactggtgtgactcctcgccctgcaagaacggcggcaaatgctggcagacccacacccagtaccgctgcgagtgccccagcggctggaccggcctttactgcgacgtgcccagcgtgtcctgtgaggtggctgcgcagcgacaaggtgttgacgttgcccgcctgtgccagcatggagggctctgtgtggacgcgggcaacacgcaccactgccgctgccaggcgggctacacaggcagctactgtgaggacctggtggacgagtgctcacccagcccctgccagaacggggccacctgcacggactacctgggcggctactcctgcaagtgcgtggccggctaccacggggtgaactgctctgaggagatcgacgagtgcctctcccacccctgccagaacgggggcacctgcctcgacctccccaacacctacaagtgctcctgcccacggggcactcagggtgtgcactgtgagatcaacgtggacgactgcaatccccccgttgaccccgtgtcccggagccccaagtgctttaacaacggcacctgcgtggaccaggtgggcggctacagctgcacctgcccgccgggcttcgtgggtgagcgctgtgagggggatgtcaacgagtgcctgtccaatccctgcgacgcccgtggcacccagaactgcgtgcagcgcgtcaatgacttccactgcgagtgccgtgctggtcacaccgggcgccgctgcgagtccgtcatcaatggctgcaaaggcaagccctgcaagaatgggggcacctgcgccgtggcctccaacaccgcccgcgggttcatctgcaagtgccctgcgggcttcgagggcgccacgtgtgagaatgacgctcgtacctgcggcagcctgcgctgcctcaacggcggcacatgcatctccggcccgcgcagccccacctgcctgtgcctgggccccttcacgggccccgaatgccagttcccggccagcagcccctgcctgggcggcaacccctgctacaaccaggggacctgtgagcccacatccgagagccccttctaccgttgcctgtgccccgccaaattcaacgggctcttgtgccacatcctggactacagcttcgggggtggggccgggcgcgacatccccccgccgctgatcgaggaggcgtgcgagctgcccgagtgccaggaggacgcgggcaacaaggtctgcagcctgcagtgcaacaaccacgcgtgcggctgggacggcggtgactgctccctcaacttcaatgacccctggaagaactgcacgcagtctctgcagtgctggaagtacttcagtgacggccactgtgacagccagtgcaactcagccggctgcctcttcgacggctttgactgccagcgtgcggaaggccagtgcaaccccctgtacgaccagtactgcaaggaccacttcagcgacgggcactgcgaccagggctgcaacagcgcggagtgcgagtgggacgggctggactgtgcggagcatgtacccgagaggctggcggccggcacgctggtggtggtggtgctgatgccgccggagcagctgcgcaacagctccttccacttcctgcgggagctcagccgcgtgctgcacaccaacgtggtcttcaagcgtgacgcacacggccagcagatgatcttcccctactacggccgcgaggaggagctgcgcaagcaccccatcaagcgtgccgccgagggctgggccgcacctgacgccctgctgggccaggtgaaggcctcgctgctccctggtggcagcgagggtgggcggcggcggagggagctggaccccatggacgtccgcggctccatcgtctacctggagattgacaaccggcagtgtgtgcaggcctcctcgcagtgcttccagagtgccaccgatgtggccgcattcctgggagcgctcgcctcgctgggcagcctcaacatcccctacaagatcgaggccgtgcagagtgagaccgtggagccgcccccgccggcgcagctgcacttcatgtacgtggcggcggccgcctttgtgcttctgttcttcgtgggctgcggggtgctgctgtcccgcaagcgccggcngcagcatggccagctctggttccctgagggcttcaaagtgtctgaggccagcaagaagaagcggcgggagnccctcggcgaggactccgtgggcctcaagcccctgaagaacgcttcagacggtgccctcatggacgacaaccagaatgagtggggggacgaggacctggagaccaagaagttccggttcgaggagcccgtggttctgcctgacctggacgaccagacagaccaccggcagtggactcagcagcacctggatgccgctgacctgcgcatgtctgccatggcccccacaccgccccagggtgaggttgacgccgactgcatggacgtcaatgtccgcgggcctgatggcttcaccccgctcatgatcgcctcctgcagcgggggcggcctggagacgggcaacagcgaggaagaggaggacgcgccggccgtcatctccgacttcatctaccagggcgccagcctgcacaaccagacagaccgcacgggcgagaccgccttgcacctggccgcccgctactcacgctctgatgccgccaagcgcctgctggaggccagcgcagatgccaacatccaggacaacatgggccgcaccccgctgcatgcggctgtgtctgccgacgcacaaggtgtcttccagatcctgatccggaaccgagccacagacctggatgcccgcatgcatgatggcacgacgccactgatcctggctgcccgcctggccgtggagggcatgctggaggacctcatcaactcacacgccgacgtcaacgccgtagatgacctgggcaagtccgccctgcactgggccgccgccgtgaacaatgtggatgccgcagttgtgctcctgaagaacggggctaacaaagatatgcagaacaacagggaggagacacccctgtttctggccgcccgggagggcagctacgagaccgccaaggtgctgctggaccactttgccaaccgggacatcacggatcatatggaccgcctgccgcgcgacatcgcacaggagcgcatgcatcacgacatcgtgaggctgctggacgagtacaacctggtgcgcagcccgcagctgcacggagccccgctggggggcacgcccaccctgtcgcccccgctctgctcgcccaacggctacctgggcagcctcaagcccggcgtgcagggcaagaaggtccgcaagcccagcagcaaaggcctggcctgtggaagcaaggaggccaaggacctcaaggcacggaggaagaagtcccaggayggcaagggctgcctgctggacagctccggcatgctctcgcccgtggactccctggagtcaccccatggctacctgtcagacgtggcctcgccgccactgctgccctccccgttccagcagtctccgtccgtgcccctcaaccacctgcctgggatgcccgacacccacctgggcatcgggcacctgaacgtggcggccaagcccgagatggcggcgctgggtgggggcggccggctggcctttgagactggcccacctcgtctctcccacctgcctgtggcctctggcaccagcaccgtcctgggctccagcagcggaggggccctgaatttcactgtgggcgggtccaccagtttgaatggtcaatgcgagtggctgtcccggctgcagagcggcatggtgccgaaccaatacaaccctctgcgggggagtgtggcaccaggccccctgagcacacaggccccctccctgcagcatggcatggtaggcccgctgcacagtagccttgctgccagcgccctgtcccagatgatgagctaccagggcctgcccagcacccggctggccacccagcctcacctggtgcagacccagcaggtgcagccacaaaacttacagatgcagcagcagaacctgcagccagcaaacatccagcagcagcaaagcctgcagccgccaccaccaccaccacagccgcaccttggcgtgagctcagcagccagcggccacctgggccggagcttcctgagtggagagccgagccaggcagacgtg

SEQ ID NO: 28992 - DNA, 8972 bp, Homo Sapiens
gtccaagggtagccaaggatggctgcagcttcatatgatcagttgttaaagcaagttgaggcactgaagatggagaactcaaatcttcgacaagagctagaagataattccaatcatcttacaaaactggaaactgaggcatctaatatgaaggaagtacttaaacaactacaaggaagtattgaagatgaagctatggcttcttctggacagattgatttattagagcgtcttaaagagcttaacttagatagcagtaatttccctggagtaaaactgcggtcaaaaatgtccctccgttcttatggaagccgggaaggatctgtatcaagccgttctggagagtgcagtcctgttcctatgggttcatttccaagaagagggtttgtaaatggaagcagagaaagtactggatatttagaagaacttgagaaagagaggtcattgcttcttgctgatcttgacaaagaagaaaaggaaaaagactggtattacgctcaacttcagaatctcactaaaagaatagatagtcttcctttaactgaaaatttttccttacaaacagatatgaccagaaggcaattggaatatgaagcaaggcaaatcagagttgcgatggaagaacaactaggtacctgccaggatatggaaaaacgagcacagcgaagaatagccagaattcagcaaatcgaaaaggacatacttcgtatacgacagcttttacagtcccaagcaacagaagcagagaggtcatctcagaacaagcatgaaaccggctcacatgatgctgagcggcagaatgaaggtcaaggagtgggagaaatcaacatggcaacttctggtaatggtcagggttcaactacacgaatggaccatgaaacagccagtgttttgagttctagtagcacacactctgcacctcgaaggctgacaagtcatctgggaaccaaggtggaaatggtgtattcattgttgtcaatgcttggtactcatgataaggatgatatgtcgcgaactttgctagctatgtctagctcccaagacagctgtatatccatgcgacagtctggatgtcttcctctcctcatccagcttttacatggcaatgacaaagactctgtattgttgggaaattcccggggcagtaaagaggctcgggccagggccagtgcagcactccacaacatcattcactcacagcctgatgacaagagaggcaggcgtgaaatccgagtccttcatcttttggaacagatacgcgcttactgtgaaacctgttgggagtggcaggaagctcatgaaccaggcatggaccaggacaaaaatccaatgccagctcctgttgaacatcagatctgtcctgctgtgtgtgttctaatgaaactttcatttgatgaagagcatagacatgcaatgaatgaactagggggactacaggccattgcagaattattgcaagtggactgtgaaatgtacgggcttactaatgaccactacagtattacactaagacgatatgctggaatggctttgacaaacttgacttttggagatgtagccaacaaggctacgctatgctctatgaaaggctgcatgagagcacttgtggcccaactaaaatctgaaagtgaagacttacagcaggttattgcaagtgttttgaggaatttgtcttggcgagcagatgtaaatagtaaaaagacgttgcgagaagttggaagtgtgaaagcattgatggaatgtgctttagaagttaaaaaggaatcaaccctcaaaagcgtattgagtgccttatggaatttgtcagcacattgcactgagaataaagctgatatatgtgctgtagatggtgcacttgcatttttggttggcactcttacttaccggagccagacaaacactttagccattattgaaagtggaggtgggatattacggaatgtgtccagcttgatagctacaaatgaggaccacaggcaaatcctaagagagaacaactgtctacaaactttattacaacacttaaaatctcatagtttgacaatagtcagtaatgcatgtggaactttgtggaatctctcagcaagaaatcctaaagaccaggaagcattatgggacatgggggcagttagcatgctcaagaacctcattcattcaaagcacaaaatgattgctatgggaagtgctgcagctttaaggaatctcatggcaaataggcctgcgaagtacaaggatgccaatattatgtctcctggctcaagcttgccatctcttcatgttaggaaacaaaaagccctagaagcagaattagatgctcagcacttatcagaaacttttgacaatatagacaatttaagtcccaaggcatctcatcgtagtaagcagagacacaagcaaagtctctatggtgattatgtttttgacaccaatcgacatgatgataataggtcagacaattttaatactggcaacatgactgtcctttcaccatatttgaatactacagtgttacccagctcctcttcatcaagaggaagcttagatagttctcgttctgaaaaagatagaagtttggagagagaacgcggaattggtctaggcaactaccatccagcaacagaaaatccaggaacttcttcaaagcgaggtttgcagatctccaccactgcagcccagattgccaaagtcatggaagaagtgtcagccattcatacctctcaggaagacagaagttctgggtctaccactgaattacattgtgtgacagatgagagaaatgcacttagaagaagctctgctgcccatacacattcaaacacttacaatttcactaagtcggaaaattcaaataggacatgttctatgccttatgccaaattagaatacaagagatcttcaaatgatagtttaaatagtgtcagtagtagtgatggttatggtaaaagaggtcaaatgaaaccctcgattgaatcctattctgaagatgatgaaagtaagttttgcagttatggtcaatacccagccgacctagcccataaaatacatagtgcaaatcatatggatgataatgatggagaactagatacaccaataaattatagtcttaaatattcagatgagcagttgaactctggaaggcaaagtccttcacagaatgaaagatgggcaagacccaaacacataatagaagatgaaataaaacaaagtgagcaaagacaatcaaggaatcaaagtacaacttatcctgtttatactgagagcactgatgataaacacctcaagttccaaccacattttggacagcaggaatgtgtttctccatacaggtcacggggagccaatggttcagaaacaaatcgagtgggttctaatcatggaattaatcaaaatgtaagccagtctttgtgtcaagaagatgactatgaagatgataagcctaccaattatagtgaacgttactctgaagaagaacagcatgaagaagaagagagaccaacaaattatagcataaaatataatgaagagaaacgtcatgtggatcagcctattgattatagtttaaaatatgccacagatattccttcatcacagaaacagtcattttcattctcaaagagttcatctggacaaagcagtaaaaccgaacatatgtcttcaagcagtgagaatacgtccacaccttcatctaatgccaagaggcagaatcagctccatccaagttctgcacagagtagaagtggtcagcctcaaaaggctgccacttgcaaagtttcttctattaaccaagaaacaatacagacttattgtgtagaagatactccaatatgtttttcaagatgtagttcattatcatctttgtcatcagctgaagatgaaataggatgtaatcagacgacacaggaagcagattctgctaataccctgcaaatagcagaaataaaagaaaagattggaactaggtcagctgaagatcctgtgagcgaagttccagcagtgtcacagcaccctagaaccaaatccagcagactgcagggttctagtttatcttcagaatcagccaggcacaaagctgttgaattttcttcaggagcgaaatctccctccaaaagtggtgctcagacacccaaaagtccacctgaacactatgttcaggagaccccactcatgtttagcagatgtacttctgtcagttcacttgatagttttgagagtcgttcgattgccagctccgttcagagtgaaccatgcagtggaatggtaagtggcattataagccccagtgatcttccagatagccctggacaaaccatgccaccaagcagaagtaaaacacctccaccacctcctcaaacagctcaaaccaagcgagaagtacctaaaaataaagcacctactgctgaaaagagagagagtggacctaagcaagctgcagtaaatgctgcagttcagagggtccaggttcttccagatgctgatactttattacattttgccacggaaagtactccagatggattttcttgttcatccagcctgagtgctctgagcctcgatgagccatttatacagaaagatgtggaattaagaataatgcctccagttcaggaaaatgacaatgggaatgaaacagaatcagagcagcctaaagaatcaaatgaaaaccaagagaaagaggcagaaaaaactattgattctgaaaaggacctattagatgattcagatgatgatgatattgaaatactagaagaatgtattatttctgccatgccaacaaagtcatcacgtaaagcaaaaaagccagcccagactgcttcaaaattacctccacctgtggcaaggaaaccaagtcagctgcctgtgtacaaacttctaccatcacaaaacaggttgcaaccccaaaagcatgttagttttacaccgggggatgatatgccacgggtgtattgtgttgaagggacacctataaacttttccacagctacatctctaagtgatctaacaatcgaatcccctccaaatgagttagctgctggagaaggagttagaggaggagcacagtcaggtgaatttgaaaaacgagataccattcctacagaaggcagaagtacagatgaggctcaaggaggaaaaacctcatctgtaaccatacctgaattggatgacaataaagcagaggaaggtgatattcttgcagaatgcattaattctgctatgcccaaagggaaaagtcacaagcctttccgtgtgaaaaagataatggaccaggtccagcaagcatctgcgtcgtcttctgcacccaacaaaaatcagttagatggtaagaaaaagaaaccaacttcaccagtaaaacctataccacaaaatactgaatataggacacgtgtaagaaaaaatgcagactcaaaaaataatttaaatgctgagagagttttctcagacaacaaagattcaaagaaacagaatttgaaaaataattccaaggacttcaatgataagctcccaaataatgaagatagagtcagaggaagttttgcttttgattcacctcatcattacacgcctattgaaggaactccttactgtttttcacgaaatgattctttgagttctctagattttgatgatgatgatgttgacctttccagggaaaaggctgaattaagaaaggcaaaagaaaataaggaatcagaggctaaagttaccagccacacagaactaacctccaaccaacaatcagctaataagacacaagctattgcaaagcagccaataaatcgaggtcagcctaaacccatacttcagaaacaatccacttttccccagtcatccaaagacataccagacagaggggcagcaactgatgaaaagttacagaattttgctattgaaaatactccagtttgcttttctcataattcctctctgagttctctcagtgacattgaccaagaaaacaacaataaagaaaatgaacctatcaaagagactgagccccctgactcacagggagaaccaagtaaacctcaagcatcaggctatgctcctaaatcatttcatgttgaagataccccagtttgtttctcaagaaacagttctctcagttctcttagtattgactctgaagatgacctgttgcaggaatgtataagctccgcaatgccaaaaaagaaaaagccttcaagactcaagggtgataatgaaaaacatagtcccagaaatatgggtggcatattaggtgaagatctgacacttgatttgaaagatatacagagaccagattcagaacatggtctatcccctgattcagaaaattttgattggaaagctattcaggaaggtgcaaattccatagtaagtagtttacatcaagctgctgctgctgcatgtttatctagacaagcttcgtctgattcagattccatcctttccctgaaatcaggaatctctctgggatcaccatttcatcttacacctgatcaagaagaaaaaccctttacaagtaataaaggcccacgaattctaaaaccaggggagaaaagtacattggaaactaaaaagatagaatctgaaagtaaaggaatcaaaggaggaaaaaaagtttataaaagtttgattactggaaaagttcgatctaattcagaaatttcaggccaaatgaaacagccccttcaagcaaacatgccttcaatctctcgaggcaggacaatgattcatattccaggagttcgaaatagctcctcaagtacaagtcctgtttctaaaaaaggcccaccccttaagactccagcctccaaaagccctagtgaaggtcaaacagccaccacttctcctagaggagccaagccatctgtgaaatcagaattaagccctgttgccaggcagacatcccaaataggtgggtcaagtaaagcaccttctagatcaggatctagagattcgaccccttcaagacctgcccagcaaccattaagtagacctatacagtctcctggccgaaactcaatttcccctggtagaaatggaataagtcctcctaacaaattatctcaacttccaaggacatcatcccctagtactgcttcaactaagtcctcaggttctggaaaaatgtcatatacatctccaggtagacagatgagccaacagaaccttaccaaacaaacaggtttatccaagaatgccagtagtattccaagaagtgagtctgcctccaaaggactaaatcagatgaataatggtaatggagccaataaaaaggtagaactttctagaatgtcttcaactaaatcaagtggaagtgaatctgatagatcagaaagacctgtattagtacgccagtcaactttcatcaaagaagctccaagcccaaccttaagaagaaaattggaggaatctgcttcatttgaatctctttctccatcatctagaccagcttctcccactaggtcccaggcacaaactccagttttaagtccttcccttcctgatatgtctctatccacacattcgtctgttcaggctggtggatggcgaaaactcccacctaatctcagtcccactatagagtataatgatggaagaccagcaaagcgccatgatattgcacggtctcattctgaaagtccttctagacttccaatcaataggtcaggaacctggaaacgtgagcacagcaaacattcatcatcccttcctcgagtaagcacttggagaagaactggaagttcatcttcaattctttctgcttcatcagaatccagtgaaaaagcaaaaagtgaggatgaaaaacatgtgaactctatttcaggaaccaaacaaagtaaagaaaaccaagtatccgcaaaaggaacatggagaaaaataaaagaaaatgaattttctcccacaaatagtacttctcagaccgtttcctcaggtgctacaaatggtgctgaatcaaagactctaatttatcaaatggcacctgctgtttctaaaacagaggatgtttgggtgagaattgaggactgtcccattaacaatcctagatctggaagatctcccacaggtaatactcccccggtgattgacagtgtttcagaaaaggcaaatccaaacattaaagattcaaaagataatcaggcaaaacaaaatgtgggtaatggcagtgttcccatgcgtaccgtgggtttggaaaatcgcctgaactcctttattcaggtggatgcccctgaccaaaaaggaactgagataaaaccaggacaaaataatcctgtccctgtatcagagactaatgaaagttctatagtggaacgtaccccattcagttctagcagctcaagcaaacacagttcacctagtgggactgttgctgccagagtgactccttttaattacaacccaagccctaggaaaagcagcgcagatagcacttcagctcggccatctcagatcccaactccagtgaataacaacacaaagaagcgagattccaaaactgacagcacagaatccagtggaacccaaagtcctaagcgccattctgggtcttaccttgtgacatctgtttaaaagagaggaagaatgaaactaagaaaattctatgttaattacaactgctatatagacattttgtttcaaatgaaactttaaaagactgaaaaattttgtaaataggtttgattcttgttagagggtttttgttctggaagccatatttgatagtatactttgtcttcactggtcttattttgggaggcactcttgatggttaggaaaaaaatagtaaagccaagtatgtttgtacagtatgttttacatgtatttaaagtagcacccatcccaacttcctttaattattgcttgtcttaaaataatgaacactacagatagaaaatatgatatattgctgttatcaatcatttctagattataaactgactaaacttacatcagggaaaaattggtatttatgcaaaaaaaaatgtttttgt

SEQ ID NO: 28993 - DNA, 3076 bp, Homo Sapiens
agtcactgtcccggaacctggggcagcggagtcccgtgcgccctgtggtgacagctcaggagggtgtgtgcgctcagcaggggccagcatggaccagtctgtggcaatccaggagacgctggctgagggggaatactgcgtcatcgcggtgcaaggtgtgctgtgtgagggggacagccggcagagccgcctcctgggactcgtgcgctaccgcctggagcatggcggccaggaacacgctctcttcctctatacgcaccggaggatggccattaccggggacgatgtctctctggaccagatagtgccagtctcgcgggattttacgctggaagaagtgtccccagatggtgaactctacatccttggctcagatgtgaccgtccagctggacacagcagagcttagcctcgtattccaactgccctttggttcacaaaccaggatgttcctccacgaagttgccagggcctgtccaggcttcgattctgcgacccgggatcctgaattcctgtggctgtctcggtataggtgcgcagagctggagctggagatgccaacgccgcgcggttgtaactcggccctagttacctggccagggtacgcgacaattggcggaggtggttctaactttgatggtttgagaccaaatgggaagggagtgcctatggaccaaagctccaggggtcaagataaaccagaaagcttgcaaccaagacagaataaatccaagtccgaaattactgacatggttcgctcctccactatcacagtgtcggacaaggctcatattttatccatgcagaagtttggactgcgagatacaattgtgaaatcacatctactacagaaagaagaggattacacctatatccagaacttcaggttttttgcgggaacatacaatgtaaatgggcagtcccccaaagaatgcctccggctgtggctgagcaatggtatccaggccccagatgtctattgtgtagggttccaggagcttgatctgagtaaggaagcttttttctttcacgataccccaaaggaggaagagtggttcaaagctgtgtcagagggtcttcatccagatgccaaatatgcaaaggtgaagcttatccgactggttgggattatgctgctgttatatgtcaaacaggagcatgcagcttatatctcagaagtggaagccgagactgtggggacaggaatcatggggaggatgggcaacaagggaggcgtggcgatcaggttccagttccacaacaccagcatctgcgttgtgaattctcacttggcagcccacattgaagagtatgagaggaggaaccaggactataaggacatttgttctcgaatgcagttttgtcagcctgacccaagccttccccctctcaccatcagcaaccatgatgtgatcttgtggctgggggacctcaactacaggatagaagagctggatgtggaaaaagtgaaaaagctcatcgaagagaaggattttcaaatgctgtatgcatatgatcagctgaaaattcaggtggccgcaaagactgtctttgaaggcttcacagagggtgagctcacattccagcctacttacaagtatgatacgggctctgacgactgggataccagtgagaagtgccgtgctcctgcctggtgtgatcggattctctggaaagggaagaacatcactcagctgagttaccagagccacatggccctgaagaccagtgaccacaagcctgtcagctcagtgtttgacatcggggtgagggtcgtaaatgacgagctttaccggaagacactggaggaaattgttcgctccctggataagatggaaaatgccaacattccttctgtgtccctgtccaagcgagagttctgttttcagaatgtgaagtacatgcaattgaaagtagaatcctttacaattcataatggacaagtaccctgtcattttgaattcatcaacaagcctgatgaagagtcttactgtaagcagtggctgaatgccaaccccagcagaggcttcctcctgccagattctgatgttgagattgacttggagctcttcgtaaataagacgacagctacaaagctcaactcgggtgaagacaaaattgaggacattctggttctgcacttggacaggggaaaggattactttttgtctgtgtctgggaactacctgcccagctgttttgggtctcccattcatacactgtgttacatgagagagccaatcttggacctaccacttgaaaccattagtgagctgactctgatgccagtatggactggagatgatgggagccagttggatagccccatggaaatccccaaagagctctggatgatggttgattacctgtaccgaaatgctgtccagcaggaagatctgtttcagcaaccaggcctgaggtcagaatttgaacatatcagggactgcttggatactggaatgattgataacctctctgccagcaatcattctgtagccgaagccctgctgcttttcctggagagccttccagagcctgtcatctgttacagcacctaccataactgcttggagtgttctggcaactacacagcaagcaaacaggtcatttctactctccccatattccacaaaaatgtcttccactacttgatggcgtttttgcgagaactgctgaaaaattcagcaaaaaatcatttggatgagaatattctagctagcatatttggcagcttattgcttcgaaacccagctggtcaccaaaagcttgatatgacagagaagaagaaggctcaagaatttattcaccagttcctctgcaacccactctgagcctatctctcctcctattttacttgaggctgccaattaccagccccacctgtttcagctcaagagatgccttaagataattatgtgaggccacttggtagcaagaatggcagctatttcctgagcctagtaccccaattaagcccaccattggttagcacactcagcgctgtgagtcgtgaagacacgggagaaaatccaccataataaaactgacattcaattttcaaaaaaaaaaaaaaaaaa

SEQ ID NO: 28994 - DNA, 2591 bp, Homo Sapiens
cgtccctctttctccaccccgccgagcctaaactagtgacggggagggagacgggatagtgtttctgtttccgtggtctttgaatccacaacctctagtctgaacacagagaacacaaatttgtcgattacttcaggaagcccagggggaaccgcgccccgctgaagggctcggggaaggcgcgctcccgcgtcccgccccctcctcccccagcactcacactgtggtagcggcggagggcggagggatccggaggcggcggagggagacgtcattgcagggttgtttgtcagtctcggcggcggcggcggcggcggcggcggcggcggcgatccacagtgattcggccgcgccgccgggggtgggggggctgcgcgggacttttttttttttcagactgaccgcggggcagctgcggagcatgtcgaccccggcccggaggaggctcatgcgggatttcaagcggttacaagaggacccacctgtgggtgtcagtggcgcaccatctgaaaacaacatcatgcagtggaatgcagttatatttggaccagaagggacaccttttgaagatggtacttttaaactagtaatagaattttctgaagaatatccaaataaaccaccaactgttaggtttttatccaaaatgtttcatccaaatgtgtatgctgatggtagcatatgtttagatatccttcagaatcgatggagtccaacatatgatgtatcttctatcttaacatcaattcagtctctgctggatgaaccgaatcctaacagtccagccaatagccaggcagcacagctttatcaggaaaacaaacgagaatatgagaaaagagtttcggccattgttgaacaaagctggaatgattcataatagacaactggtctgttaatctttttcatcattgttgtgtataatttacctctcattagaaaggctaacaaattttaagtgccacaggttttaaggattctgcagaaaaaaaagaaaaaagtccttcagtttagaacctacaaaagcttgtgtatcttgattaatgtactttttattgcatggtgtgaactaagttattgctgcataaatttgtaatatatcctgtttgtatttttttccaagtgtataatgttggtgtggagttttcatgacagaatatacacattttgtaaatctgtacttttttcaaatattgaatgccttatttttgaattctttagatttttaaattggagaaaagcacttaaagttttttatatatgaatattacatgtaaagctgttaaaatacataacttcagtgcaagagactttgtcacttatttccttatgtgtgtaggaggggttaataagtctctagctctccatctattgatagtttcatttacaatttcaaaagaacattcttatattttatcaaggaagtcttcaaatttgattctaaatagcgattataatctccaactttattttgaatgtacctctattagtttcaattgagtaattctagacataactggtttgactctgtccaactctgtatttaggccatttgttacagtttcttcatgcattacttactgttaaaactgtaccttttgcgatttcacagttggcacttctgccatgagcagagaactgatgcgacttgttttgctgcttggtagcactttaaaaaattttttgattaatgaagaaagtaaaaccataaacattgccaaaaattcatgccccagtattagcaatgaattagttgaattggtttgagaaaggcacatattggagggaaatcttggtgtaacttaaatatttgaaaattacctttaatgcaatgcatatctgtttattctgggaaatgttttaatgccagggcctgctgagttgcttcttcttgtggagattttttttttaatctcctgagttgtataaaagttgtactgcatcttagtttactggataaatttaaaacacagtattgtagaaagctaatacaaaactatcctatgccttcaaatagtatagaaaatggaaaatatacaagtaaattctgttgaaccacctgtgtagtctctctagtagttaaaacagctattttagtaaccccaagagtttcttctcatatccataaaattggattacagtatggcaatatctacagcttctattcattatgcaacgtttaacattgattggataaatgcttataggctgggccaggtggctcccacctgtagtcccagcactttgggaggcaaaggcgggaggatcacttgaggccaggactttgagaccagccagggcaacataataagacttttctctactttaaattttttaaaaaattagttgggcatagtggcacttgcctgtagtctcagctacttaggaggctgaggtggcagaatagcttatgcctaggaggttgaggctgcagtgagctgtgattatgccattgcactccagcctgggtgacagagcaataccctgtctttaaaaataaaagctattacttggcaaaaaattccgcactatataattcgcacacattaattagggtttatgtaccatacaaaaaaaaattaattagggct

SEQ ID NO: 28995 - DNA, 5198 bp, Homo Sapiens
ctcacttaaacacgtagttcccgcgaccccaacgtcccagaggcggggccggagtcggcggtggcgctccttggagccggctcccgctcctaccctgcaaacagacctcagctccgcggaagttgcgagacggggtttcaccatgttggtcgggctggtctggaaatcctgacttcaggtgatccacccgcctcggcctcccaaaatgctgggattacaagcgtgagccaccgcccctgacatgagccattgacttttaaagcaggagaataatttggatcagatttatatggaaacactcttctagcagcattatggggacttttccataagtctggatactgaggatttggaattaaagaaatcattcaccagacatcatggagcctatatatccttttgcacggccccagatgaataccaggtttccttcaagcaggatggtacctttccactttcctccatcaaaatgtgcactttggaacccaacgccaactggagatttcatctacttacatctcagttactacagaaatccaaagcttgtggtgactgagaagaccatccgacttgcttatcgtcatgctaacgagaataaaaaaaattcgtcatgctttttacttggttctctgacagcagacgaagatgaagaaggtgtaacattgacagtagatcgctttgatcctggtcgagaagtacctgaatgcctagaaataacccctactgcttctcttcctggggactttttgattccatgcaaagttcatactcaagaactttgttcaagagaaatgatagttcacagtgtagatgacttcagttcagctttaaaggctctacagtgccatatatgtagcaaagattccttggactgtggtaagctgctttccctaagagttcatatcacttccagggagagtttggacagtgtggaatttgacttgcattgggcagcagtaactctagcaaataactttaaatgcacacctgtgaagcccatccccattattccaacagctctggcaagaaacttgagcagtaatctgaatatttctcaagttcaagggacttataaatatggatatcttaccatggatgaaacacgcaaattgttacttttgttggaatctgatcccaaggtttattctctaccattggtgggaatttggctgtctggaattacacatatctatagtcctcaggtatgggcttgctgtttgcgatacatattcaattcttctgttcaagaaagggttttttcagaatctggaaatttcatcatagttctctattctatgacacataaggaacctgagttttatgaatgcttcccttgtgatggcaagatacctgactttcggtttcagttgctaaccagtaaggaaacattacatcttttcaaaaatgttgaacctcctgacaaaaatccaatccgttgtgaactgagcgctgaaagccaaaatgcagaaacagagtttttcagtaaggcttccaagaatttttcaattaagaggtcttcccaaaagttatcttctgggaagatgccaatacatgatcacgactctggtgttgaagatgaagatttttctccaagaccaattcctagtcctcatccagtgagtcagaagatttctaagatccaaccatcagttcctgaactttcacttgtgttggatggcaatttcatagaatcaaaccctctgcctactccattggaaatggtgaataatgaaaatcctcctttgattaaccacttggaacacttgaagccattgcaaccccagctttatgatgagaaacacagtccagaagttgaagctggagagccttccttgagaggaataccaaatcagttaaaccaggataaaccagctcttttgagacactgcaaagtaagacagccacctgcctataagaaagggaacccccataccaggaacagtattaaaccatcttctcataatgggccatctcatgatatatttgaaaagctccaaacagtttctgctggaaatgtacaaaacgaagagtatcctataagaccctccacacttaattctaggcagtcttctcttgccccgcagtcccaaccacacgattttgttttttcaccccataattcaggaagaccaatggaacttcagatacctactcccccactgccatcttactgttccacaaacgtttgcaggtgttgtcagcatcatagtcatattcaatatagtccgctaaattcttggcaaggagcaaacacagttggatccattcaagatgtccagtctgaagcccttcaaaagcattcattatttcacccaagtggatgtccagccctgtactgtaatgcattctgttcttcaagtagtcctatagccttgagacctcagggagatatgggcagttgttctccccacagcaatattgaaccatcgcctgtggcaagaccgccttcacatatggacttatgtaacccacagccttgcacagtgtgcatgcacacacccaagactgagtcagataatggaatgatgggactatctccagatgcatatcggttcctcacagaacaagacagacagctaagactacttcaggcacagattcagcgtttgttggaagcacagtctctgatgccctgttcccctaagacaactgctgttgaagacacagtgcaagctggaagacaaatggagttggtttctgtggaagcacagtcttcccctggcttgcacatgagaaaaggtgtaagcattgctgtgagcacaggtgctagcttgttttggaatgcagcaggtgaggatcaagagcctgactctcaaatgaagcaagatgataccaaaatttccagtgaggacatgaatttttctgtcgatattaataatgaagtcacaagtcttccaggtagtgcatcttcattaaaagcagttgatattcccagttttgaagagagcaacattgctgtggaagaagaatttaaccagccactttctgtatccaactcttctctagttgtgagaaaagaacctgatgtacctgtgttctttccaagtggccagctggcagaaagtgtaagcatgtgtttacagactggaccaacagggggtgccagtaacaattctgaaacatcagaggaaccaaaaattgagcatgtaatgcaacccttgcttcatcaaccatcagataaccagaaaatttaccaggatttattgggtcaagtaaaccacctattaaatagttcctccaaggaaactgagcagccgtctaccaaagcagtaattatcagtcatgaatgcaccagaacccaaaacgtttaccatacaaagaaaaaaacacatcattcaagactggtggacaaagattgtgtccttaatgcaactcttaagcaactaagaagccttggagtaaaaattgattctcccactaaagtgaagaaaaatgcacataacgtggatcacgccagtgtgttggcatgcatcagcccagaagcagtgatctctggattaaactgcatgtcatttgctaatgttggcatgagcggcttaagccccaatggtgtggatttgagcatggaggcaaatgctatagctctgaaatatttaaatgaaaatcagctgtcacaactgtctgtcactcgatcgaaccaaaataattgtgacccattcagccttctccatattaatacagacagaagcacagtggggcttagtttaatttcaccaaacaacatgtcatttgcaaccaaaaaatatatgaagagatatggactcctacaaagcagtgacaatagtgaagatgaagaggaacctcccgacaatgcagatagcaagagtgaatatttattgaatcagaaccttaggtccatacccgaacagcttggtggtcagaaagagccttctaagaatgaccatgaaataattaattgttctaactgtgaatctgtggggaccaacgcagatacgccagtattgagaaatattacaaatgaagttttgcagacaaaagcaaaacagcagttgactgaaaagccagctttcttagtaaagaaccttaaaccaagtcctgcagtgaaccttcgaaccgggaaagcagagttcactcaacatcctgagaaagaaaatgaaggggacattacaatttttcctgaaagtttgcaaccttctgaaacgctaaagcagatgaatagcatgaattcagtaggcaccttcttagatgtaaaacgtctcagacagttaccaaaattattttaaccttttaactccctgcccttttaatacagggacagggtgtctcctgaagatacttagggaaaacaggagcctaccacaaggctcctgatcattctggagtcactgtttcttggtagcagccaattgggaagagtgacttctgtgagatggctggctggtgataggactaagttctcattgttcaaatagagctgttcaacatcactgaaacctttaagaaaagccctgagatcagttattcctacaagtttaagtagtagacagatactatccagctctaagtctcaactgctcttttatactgtacttttttttttgagacggagttttgctcttgtagcccaggctggagtgcaatggcaggatctcagatcactgcaacctctgcctcctgggttcaagcgattttcctgcttcatcttcccaggtagctgggattacaggcatgtgccacaacgcctggctaattttgtatttttagtagagactggtttctccatgttggtcaggctggtctcaaactcccgacctcaggtgatccgcccgcctcggcctcctaaagtgctgggattacaggcgtgagccactgcccagctatactgtatatttaagaaggtccagcatgttgcatctctgcattatcctatatcataaaagaagcataagttatcatggtgttgggtaaattagcgaaatcaaccgcttcctaagtttaagggaaaagttatttttaaaaacaacttaataaaaacttacactcttatacaagagtgtatttccccttaattaggatgcatgttgattaaactcgagatacagctttttgcagtatggtgggttggttttggtgtaacatcttcaacatgtcacactggctatcaaagaataagaaaattattgagtatgagtgtgttttataaactttctgagtttttcagatgtcttaatattttt

SEQ ID NO: 28996 - DNA, 3336 bp, Homo Sapiens
ttttcttagacattaactgcagacggctggcaggatagaagcagcggctcacttggactttttcaccagggaaatcagagacaatgatggggctcttccccagaactacaggggctctggccatcttcgtggtggtcatattggttcatggagaattgcgaatagagactaaaggtcaatatgatgaagaagagatgactatgcaacaagctaaaagaaggcaaaaacgtgaatgggtgaaatttgccaaaccctgcagagaaggagaagataactcaaaaagaaacccaattgccaagattacttcagattaccaagcaacccagaaaatcacctaccgaatctctggagtgggaatcgatcagccgccttttggaatctttgttgttgacaaaaacactggagatattaacataacagctatagtcgaccgggaggaaactccaagcttcctgatcacatgtcgggctctaaatgcccaaggactagatgtagagaaaccacttatactaacggttaaaattttggatattaatgataatcctccagtattttcacaacaaattttcatgggtgaaattgaagaaaatagtgcctcaaactcactggtgatgatactaaatgccacagatgcagatgaaccaaaccacttgaattctaaaattgccttcaaaattgtctctcaggaaccagcaggcacacccatgttcctcctaagcagaaacactggggaagtccgtactttgaccaattctcttgaccgagagcaagctagcagctatcgtctggttgtgagtggtgcagacaaagatggagaaggactatcaactcaatgtgaatgtaatattaaagtgaaagatgtcaacgataacttcccaatgtttagagactctcagtattcagcacgtattgaagaaaatattttaagttctgaattacttcgatttcaagtaacagatttggatgaagagtacacagataattggcttgcagtatatttctttacctctgggaatgaaggaaattggtttgaaatacaaactgatcctagaactaatgaaggcatcctgaaagtggtgaaggctctagattatgaacaactacaaagcgtgaaacttagtattgctgtcaaaaacaaagctgaatttcaccaatcagttatctctcgataccgagttcagtcaaccccagtcacaattcaggtaataaatgtaagagaaggaattgcattccgtcctgcttccaagacatttactgtgcaaaaaggcataagtagcaaaaaattggtggattatatcctgggaacatatcaagccatcgatgaggacactaacaaagctgcctcaaatgtcaaatatgtcatgggacgtaacgatggtggatacctaatgattgattcaaaaactgctgaaatcaaatttgtcaaaaatatgaaccgagattctactttcatagttaacaaaacaatcacagctgaggttctggccatagatgaatacacgggtaaaacttctacaggcacggtatatgttagagtacccgatttcaatgacaattgtccaacagctgtcctcgaaaaagatgcagtttgcagttcttcaccttccgtggttgtctccgctagaacactgaataatagatacactggcccctatacatttgcactggaagatcaacctgtaaagttgcctgccgtatggagtatcacaaccctcaatgctacctcggccctcctcagagcccaggaacagatacctcctggagtataccacatctccctggtacttacagacagtcagaacaatcggtgtgagatgccacgcagcttgacactggaagtctgtcagtgtgacaacaggggcatctgtggaacttcttacccaaccacaagccctgggaccaggtatggcaggccgcactcagggaggctggggcctgccgccatcggcctgctgctccttggtctcctgctgctgctgttggccccccttctgctgttgacctgtgactgtggggcaggttctactgggggagtgacaggtggttttatcccagttcctgatggctcagaaggaacaattcatcagtggggaattgaaggagcccatcctgaagacaaggaaatcacaaatatttgtgtgcctcctgtaacagccaatggagccgatttcatggaaagttctgaagtttgtacaaatacgtatgccagaggcacagcggtggaaggcacttcaggaatggaaatgaccactaagcttggagcagccactgaatctggaggtgctgcaggctttgcaacagggacagtgtcaggagctgcttcaggattcggagcagccactggagttggcatctgttcctcagggcagtctggaaccatgagaacaaggcattccactggaggaaccaataaggactacgctgatggggcgataagcatgaattttctggactcctacttttctcagaaagcatttgcctgtgcggaggaagacgatggccaggaagcaaatgactgcttgttgatctatgataatgaaggcgcagatgccactggttctcctgtgggctccgtgggttgttgcagttttattgctgatgacctggatgacagcttcttggactcacttggacccaaatttaaaaaacttgcagagataagccttggtgttgatggtgaaggcaaagaagttcagccaccctctaaagacagcggttatgggattgaatcctgtggccatcccatagaagtccagcagacaggatttgttaagtgccagactttgtcaggaagtcaaggagcttctgctttgtccgcctctgggtctgtccagccagctgtttccatccctgaccctctgcagcatggtaactatttagtaacggagacttactcggcttctggttccctcgtgcaaccttccactgcaggctttgatccacttctcacacaaaatgtgatagtgacagaaagggtgatctgtcccatttccagtgttcctggcaacctagctggcccaacgcagctacgagggtcacatactatgctctgtacagaggatccttgctcccgtctaatatgaccagaatgagctggaataccacactgaccaaatctggatctttggactaaagtattcaaaatagcatagcaaagctcactgtattgggctaataatttggcacttattagcttctctcataaactgatcacgattataaattaaatgtttgggttcataccccaaaagcaatatgttgtcactcctaattctcaagtactattcaaattgtagtaaatcttaaagtttttcaaaaccctaaaatcatattcgc

SEQ ID NO: 28997 - DNA, 7138 bp, Homo Sapiens
gccgccccgcgggccaaagtcgagccctcccgcccgtgggcgagcgcgccagccgccccttccagaacagccgccgccacaaagaagaacggggggtgccgaggtccccatgacctcctaaagtggtgcggtccctgctgagtgcgctgcccgggccgtgacccgcgcccctgtgcgtccccgcgcgcctccgagcgcccctgtgcgccccggcccgcgccccgccggcatggacgtccatacccgctggaaagcgcgcagcgcgctccgcccgggcgccccgctgctgcccccgctgctgctgctgctgctgtgggcgccgcctccgagccgcgcagctcagccagcagatctcctgaaggttctagattttcacaacttgcctgatggaataacaaagacaacaggcttttgcgccacgcggcgatcttccaaaggcccggatgtcgcttacagagtcaccaaagacgcgcacgtcagcgcacccaccaagcagctgtaccctgcgtctgcatttcccgaggacttctccatcctaacaactgtgaaagccaagaaaggcagccaggccttcctggtctccatctacaacgagcagggtatccagcagattgggctggagctgggccgctctcccgtcttcctctacgaggaccacacggggaagcctggcccggaagactaccccctcttccggggcatcaacctgtcagatggcaagtggcacagaattgctctcagcgtccacaagaaaaatgtcaccttgatcctcgactgtaaaaagaagaccaccaaattcctcgaccgcagcgaccaccccatgatcgacatcaatggcatcatcgtgtttggcacccggatcctggatgaggaggtgtttgagggtgacatccagcagctgctctttgtctcggaccaccgggcagcttatgattactgtgagcactacagccctgactgtgacaccgcagtacctgacaccccacagtcgcaggaccccaatccagatgaatattacacggaaggagacggcgagggtgagacctattactacgaatacccctactacgaagaccccgaagacctagggaaggagcccacccccagcaagaagcccgtggaagctgccaaagaaaccacagaggtccccgaggagctgaccccgacccccacggaagctgctcccatgcctgaaaccagtgaaggggctgggaaggaagaggacgtcggcatcggggactatgactacgtgcccagtgaggactactacacgccctcaccgtatgatgacctcacctatggcgagggggaggagaaccctgaccagcccacagacccaggcgctggggccgaaattcccaccagcaccgccgacacctccaactcctccaatccacgtccgcctccaggggaaggtgcggatgacttggagggggagttcactgaggaaacgatccggaaccttgacgagaactactacgacccctactacgaccccaccagctccccgtcggagatcgggccgggaatgccggcgaaccaggataccatctatgaagggattggaggacctcggggcgagaaaggccaaaagggagaaccagcgattatcgagccgggcatgctcatcgagggcccgcctggcccagaaggccccgcgggtcttcccggacctccaggaaccatgggtcccactggccaagtcggggaccctggagaaaggggcccccctggacgcccaggccttcctggggccgatggcctgcccggtcctccaggaaccatgctcatgctgcccttccggtttggaggtggcggcgatgcgggctccaaaggccccatggtctcagcccaggagtcccaggcgcaagccattctccagcaggccaggttggcactgaggggaccagctggcccgatgggtctcacagggagacctggccctgtgggtccccctgggagcggaggtttgaagggcgagccgggagacgtggggcctcagggtcctcgaggtgtgcaaggcccgcctggtccggccgggaagcccggaagacggggtcgggctgggagtgatggagccagaggaatgcctggacaaactggccccaagggtgaccggggtttcgacggcctggctgggttgccaggcgagaagggccacaggggtgaccctggtccttccggcccaccaggacctccgggagacgatggagaaaggggtgacgacggagaagttgggcccagggggctgcctggggagcccgggccacgtggtctgcttgggccgaaggggcccccaggccctcccggacctcccggtgtcacgggtatggacggccagccggggccaaaaggaaatgtgggtccccagggagagcctggccccccaggacagcagggtaatccaggcgcccagggtcttccaggcccccagggtgcaattggtcctccaggagaaaagggtcccttggggaaaccaggccttccaggaatgcccggtgctgacggacccccgggacaccctggcaaagaaggccctccaggagagaaaggaggtcagggtccacctggcccccagggtccgattggctacccaggtcctcgaggagtcaagggggccgatggcatccgtggtctgaagggcacaaagggcgagaagggtgaagacggctttcctgggtttaaaggagacatgggcatcaagggtgatcggggggagatcggcccacccggtcccaggggagaagatggccctgaaggcccaaagggtcgcggaggtcccaatggtgaccccggtcctctgggaccccctggggagaagggaaaactcggagtcccagggttaccagggtatccaggaagacaaggaccaaagggctctattggattccctggatttcctggcgccaatggagagaagggcggcagggggacccctggaaagccaggaccgcgggggcagcgaggcccaacgggtccgaggggtgaaagaggcccccggggcatcactgggaagcctggccccaagggcaactccggaggtgacggcccagctggccctcctggtgaacggggacccaatggaccccaaggacccacaggatttcctggaccaaagggcccccctggccctccaggcaaggatggactcccaggacaccctggacagagaggcgagactggtttccaaggcaagaccggccctccaggcccccccggcgtggtcggccctcagggtcccacgggagaaacgggcccaatgggtgagcgtggccaccctgggccccctggaccccccggtgaacaggggcttccgggccttgctggaaaagaagggacgaagggtgacccaggccctgcaggcctccctgggaaagacggccctccaggattacgtggtttccctggggaccgagggcttcctggtccagtgggagctcttggactgaaaggcaatgaagggccccctggcccaccaggccctgcgggatctccaggggagagaggtccagctggagccgctgggcccatcggaattccagggagacctgggccccagggacccccagggccggcaggagagaaaggggctcctggcgagaaaggcccacaaggcccagctggccgagacggtctccaggggcctgtggggctcccgggtccagctggccctgtgggtccccctggagaagacggagataagggagagatcggggagccggggcagaaaggaagcaagggggacaaaggagaacagggtcctcctgggcctacaggtcctcaaggccccatcggacagccaggcccctctggagctgacggcgagccggggcctcggggccagcagggccttttcgggcagaaaggtgatgaaggtcccagaggctttcctggaccccctgggccagtggggctgcagggtttgccaggacctccaggcgagaagggtgagacaggagacgtgggccagatgggccccccgggtccccctggcccccgaggaccctccggagctccaggtgctgatggcccacaaggtcccccaggtggaataggaaaccctggtgcagtgggagagaagggcgagcctggcgaagcaggtgagcctggccttccgggagaaggcggccccccgggacccaaaggagaaaggggagagaagggcgagtcaggcccttcaggtgctgccggaccccctggacccaaaggccctcccggagatgatggtcccaaaggcagccctggcccagtgggttttcctggagatcctggcccccccggagagcctggccccgcgggtcaagatggtccccctggtgacaaaggagatgatggtgaacccgggcagacgggatcccccggccctactggtgaaccaggtccatcggggcctccaggaaaaaggggtcccccaggccccgcaggccccgaaggcagacagggagagaaaggggccaagggagaagccggcttggaaggccctcctgggaagactggccccatcggcccccagggggcccctgggaagcccggaccggatggccttcgagggatccctggccctgtgggagaacaaggtctcccaggatccccaggcccggacggtccccccggccccatgggtcccccaggacttcccggcctcaaaggagattctggtcccaaaggtgaaaagggtcatccaggcctgatcgggctcatcggtcctcccggtgaacagggtgagaagggcgaccgtggtctccctggcccccagggctcctccggtcctaagggagaacagggtatcactggtccttctggcccgattgggcctcctgggccccctggcctgccgggtccgcctggtccaaaaggtgctaagggctcctcgggtccaactggcccgaagggtgaggcaggccacccaggacccccaggccccccgggccccccgggagaggtcatccagcccctgccaatccaggcatccaggacgcggcggaacatcgacgccagccagctgctggacgacgggaatggcgagaactacgtggactacgcggacggcatggaagagatcttcggctctctcaactctctgaagctggagattgagcagatgaaacggcccctgggcacgcagcagaaccccgcccgcacctgcaaggacctgcagctctgccaccccgacttcccagatggtgaatactgggtcgatcctaaccaaggatgctccagggattccttcaaggtttactgcaacttcacagccggggggtcgacatgcgtcttccctgacaagaagtccgaaggggccagaatcacttcttggcccaaagaaaacccgggctcctggttcagtgaattcaagcgtgggaaactgctctcctatgtggacgccgagggcaaccctgtgggtgtggtacagatgaccttcctgcggctgctgagcgcctctgcccaccagaacgtcacctaccactgctaccagtcagtggcctggcaggacgcagccacgggcagctacgacaaggccctccgcttcctgggctccaacgacgaggagatgtcctatgacaacaacccctacatccgcgccctggtggacggctgtgctaccaagaaaggctaccagaagacggttctggagatcgacacccccaaagtggagcaggtgcccatcgcggacatcatgttcaatgacttcggtgaagcgtcacagaaatttggatttgaagtggggccggcttgcttcatgggctaggagccgccgagcccgggctcccgagagcaacctcgtacctcagcatgccattgcttcgtgagtgtcccgtgcacgtcctgatcctggacagtgaaggcttctccctcccctcccacctgacttcatctacgcctcggcaccacggggtgtgggaccccagcccggagagaacagagggaaggagccgcgcccccacctggagctgaatcacatgacctagctgcaccccagcgcctgggcccgccccacgctctgtccacacccatgcgccccgggagcggggccatgcctccagccccccagctcgcccgacccatcctgttcgtgaataggtctcaggggttgggggagggactgccagatttggacactatatttttttctaaattcaacttgaagatgtgtatttcccctgaccttcaaaaaatgttccaaggtaagcctcgtaaaggtcatcccaccatcaccaaagcctccgtttttaacaacctccaacacgatccatttagaggccaaatgtcattctgcaggtgccttcccgatggattaaaggtgcttatgtttttgtgagttttaagtaaatatttgtggaatttaagatgaagacagtaatataatattttggtacaaaaacagctgcaggaagaggtggaggggggcctgtcattatgtttcccccccaccccccaacgaaaggaaaactaagactcccaacataaacagggccttgaagggggggattacaggcacttgggcatggagtcttcggctgcaggaagcactccgcttattcttcaggaatgggaaaggcgtgacccaacgagagcatctgtctcagagctccactcagggtcacccctctccagaggccggtatggggtggcttcagacttccactgcacgacctggagcaccaagaccacacaccacaataccaaattcacccaagaagaggtctaattgtagtgttcaaggagatgatggagttgcagagagacctggtgccaaatcgaaggatacaggcagacaccaagaccaggaagacggctatagctgagatggccagtgcaatgcgcagccctatagcacctctgtgggagtcctcgatgcagctgctgtagatccagaagagcaaaagcaggaggcagtagagggccaagaggccagaggccccagctacaaagtagcacagggatggtgctgagggacgggataaggccagggaggagccattcagggtggccacaccatacaggggacatctaccactgaaggagccctgggtccgagtcatcgccgcggccgccacggccccgcacaggaaggcggcagcaaagagcgcaagctcgacgcgctgcagccaggacagcgccatggcgccctgaccaccag

SEQ ID NO: 28998 - DNA, 8988 bp, Homo Sapiens
aatagtggatcctatacctgccacgccaataactcagtcactggctgcaacaggaccacagtcaagacgatcatagtcactggtaagtaattcctggagcatcaacactaagatctggggtacaagctttctggttttcaaataggagcagagaagaaaattttcttttgcagcctgtatccaacaggcacaaacaagtccaaattctcccctgaaaccctctcaattcatctgtgcagactctcttccctttgtttttctgatttctcacagctgaccttaggtccagcctggaatgtggggcgggggttctctcagccccagaaagccccgtgtagcaggaggggcttcacagagggggaagcagaaagggtcctcaaggtcaatttgcttctgtcactaacatgtccctttctgtaacttcttggccttcttttacctattccatgagatataaggaatatgtgagggttttaaaaacagactcacaatagttttccctaaatgagagaaggaaatgcccttcatcagggatgagcagctcagactctgctccctgctctactcccggcttgcccggtgattggctctgccctgaccccatgtggggtaggacgcaggtgtgtgcagaaggtgtccaggtggcctgtcatgaatccagctaaatcaagatggcagtcaatggctgggcgctgtggttcatgcctgtgatcccagtactttggaaggccgaggtgagaggatcacctgaggtcaggagttcgagaccagcctgaccaacatggcaaaactccatctctactaaaaatacaaaaaaaaaatttagccaggcatggttgcacatgccactaggcatgccactagggaggctgaggcacaagaatcacttgaacctgggaggcagaggttgcaatgagccgagatggcaccactgcactccagcctggacaacacagagagactctgtctcaaaaactaaataaataaataaataaaggcagtcaacacctgagcctcccctgggtcaggctgcctccctgagcttgtcctggctctgaagtcaccagctgtatgaggctgtgggcacagcacatgggatagcacagagcacagcgagtgacccacacttggagaaatcgggagattcagccacaggggctctgcattggagagaatggcaatgccaaacagcgtgtatttgtagagaaggtaagaatatcagccttttgttaacactgtgcctactctaggaatctccttcaccgtgatattctatccacagaccaggaagtaaaactcctctttacagtgggaaatcttcggattggaactccagatagtaaggtcataagactggatggggcatcatcattccctaaaaaattatttaatgaaaaaaaacactaccttcccttttgtatgtaaagtgacagtcacaggaaggatgcctgatcacagctcccaaggaaagggtcagtgggaggccaccgacagtgtcacgccctgtaatcccagcactttgggaggctgaggcgggtggatctgaggtcaggagatcaagaccatcctggctaacatggtgaaaccccgtctctactaaaaatacaaaaaattagctgggcatggtggcacatgcctttagtcccagcatgagcccaggctgaggcaggagaatggcttgaacccgggaggcagagcttgcagtgagctgagatcatgccactgcattccggcctgggtgacagagcgagactccgtctgaaaaaaaaaaaaagtcagtgggaaaaacattctacctgatgatgaggttgctcggtctgtgcgctgagaagaagattccaagtggagatatagagatatccagagggtcactctgagacgatctggggtcaggagggaggtgcagccctctccttacaattcatcacctgaacaaagacactcgaccttctgcagagggtcagggctatcccctggttggtgacctttgcacagctcactgtgggacctgagagctggctaaaatctcagggaaaggagcatagccctaggccccaggccccaaccctattctcagtaggttatctcagatactctgcttgtccacagagctaagtccagtagtagcaaagccccaaatcaaagccagcaagaccacagtcacaggagataaggactctgtgaacctgacctgctccacaaatgacactggaatctccatccgttggttcttcaaaaaccagagtctcccgtcctcggagaggatgaagctgtcccagggcaacaccaccctcagcataaaccctgtcaagagggaggatgctgggacgtattggtgtgaggtcttcaacccaatcagtaagaaccaaagcgaccccatcatgctgaacgtaaactgtaagtgactcctcaccccttcctatatgtccctctaggattactctgtcaatggtgtgcaaaatggataaaactcacaggaggcagaatatcaatgaagagaccattatagcaaacagaattgcaaagtggttaagagctcagctcaggccgggcacagtggctcacgcctgtaaccagcagtttgggaggccaaggcgggcggatcacgagggcaggagatcgagaccatcctggctaatatggtgaaaccccgtgtctactaaaaatacaaaaaaaaattagccgggcatggaggcgggcgcctgtagtcccagctagtcgggaggctgaggcgggagaatggcgagaacctgggaggcggagctttcagtgagccgagatggtgccactgcactccagtctaggcaacagagcaagactctgtctcaaaaaaaaaaaagagctcaggctctgaatcaaatatacatatacttagttggtttttttggttggttgggtttttttgtttgttttgttgttttgagacagggtctcactctgtcacccaggctggagtgctgtggtgtgatcaaagctcactcccgcctcaatcccctgggttcaagcaatcctgccacctcagcctccagagtagctggactacaggttgcaggaggatgcctggctaagtttttaagttttttttgtagagttggggtttcactgtgttgcccaggctggtctcaatctcctggtctcagcctcggcctcccaaagtgctgggattacaggaatgagccactctgcccaccccgtatttaactattctaagtacctctcatacagatggaagcatgcaatatttgtccttttgtgtctggctttacttcatttagcacaatgtctacaagctccatctatgttgtagaatgtatcagaatttcattccttttggagactgaataatattatgctgtgtagatagatacatcacattttgcttatccactcatccatctatccatctatggacagttaggttgcttccaccttttggctattatgaataatgctattacaaacatgggtatacaaatatctgttcaaatccctgctttcagttcttttaaatagatactcagaagtggaattgctggatcaaatggtaatcctgtttaattttgaagaaccatcataccattttccacagtggctataccatttcacattcccaccagcaatgcactagagttccaatttctctacatcttcaaaaacatttgttgctttctggttttgttttgttttttataatggccatcctaatggttataaggtggtatatcattggagttttgatttgcacttccctaatgattagcaatatttagcatcttttcatgtgcttatttgccatttatcttctttattcaagtcctttgcccatgttttaattaggttgtttggggatttttggttgagttgcagtagttctttatatattttggatattaatcccttatcagatatatgattctcaaatattttctcccattctataagaagtcttttcacttttgtgataatgtgctttgatacacaaaagcttttaattttcattaagtccaatttctctacttcttctttcgttgcctatgcttttagtgtcatagccaagaaatcattgccaaattcaatgttccaaagttttcactctatgttccaagagctttatagttttagctcttacatttaggtcttttatgcattttgaattaatttttatatatggtgttacataaaggttcaatttcattctttttgcatggatatccagtttcttcaatgccatttgttgaaaagactatcctttccccactgaatgatcttggcacccttgtcaaaaaacatttggctatgtatgcaaacatttctttctgggctctatattttattccactggtttctatttctttttgccagtaccatactgttttgattactgtagcttttggattttgtttgtttgttttattgttgttgtttgggtttttttgttttgttttgttttttgcttttctttctagagatggcgtttcaccatgttgccaaggctggtctcaaactcctgagctcaagcaatccacccgcctccacctcccaaagtgctaagattacaggtgtgatgattaccatagctttgtaaaaaattttgaaccaggaagtgtgagcccttcaactttgttctttttcaagattgctttggctatccatggtcccttcagagtctatataattttagaatgaatttttctatttctgcaaaaatattactggaattttgatagagattgcactgaatctgtagatcactttgggtagtagtgtcatcttaacaatattaagtcttctaatccatgaaaatggggtgtcttttcaatttatgtcttatttaatttcttttggcaatgttttgtattttgagggtacaaatctttcacctctttggttaagtttatttctaagtatttttaaagctcttataaatagaatttttttcttaattttcctttgaattgttattagtatacaaaaatacaactgatttttgcatgtggattttgtatcctgccactttgctaaatttattattctaacagtttttttgtggaatctctagggttttctatatataacttagtgtattatgcaaacaggtataattttacttctttccaatctagatgcttttttttcttgcctaattgttctgtctaggtcttccaatactacattgaatagaaatggcaaaagcaggcatccttgtcttgttcttgatcttaaaggaaaagttttcaatctttcaccattgactatgatggtagctgggggttttcacatgtagcatttattatgttgagaatttccttctattcctagtttcagtgttttttagcatgaaagaatgttgaattttgtcaaatgcttttatcgactcattttcattactggttataggtctattcagattttctatttattcatgattctatcatggcaggttttgtgtttctaggaatttgttcatttcatccaggttatccaatttgttggcattcaattactcatagtactcttataatccttattatttctgcagaattagtagtaatgttttactttcatttctgactttagtaatttgaatcttctttctttcttagtcaatctaattaacagttgtcaattatagtgatcttttttggaggacaactttttttttttcggtttgagacaggttctcactctgtcaccgaggctgatcatggctcaccacagcctcaacttcccgggttcaagcaatcctcctgcttcagcctcctgggtagctgaaactacagacaagcactaccacctccggctaatttttgtaattttttgtagagacagggtttcaccatcttgcccagctggtctcaaattcctgagctcaagtgatacacctgcctcagcctcccaaattgctgggattacagtcatacaccactgtacctggcctacagttataaatttctttcttgcacaagattcttaactactctgagcctcggattcctcaaccgaaaattgcactgtgaatgcctgctccatagtattgcacgggtttggggtttttgttttgtttttgagacagggtgtcactctgtcacccagactggagtgcagtggtgcaaacacagctcactgcagcctcaacctcctgggctcaagcaattccctcaccttcgccccctaagtagtacatactaccacatctggctaatttatttttatttttgttttcagagagacagaatctcaccatgttacccaggctggactcgaactcctgggctcaagcaatcctcccatctgtttcccaaagtgctgagattacaggtgtgagccaccacgcctggccccatagtgttattttaaagatttaatgtaataataaaccttcagcaaaacaccacacacagaggaaatgtttcataaatgttagctgctattactactactattatcattagccttgaaatcaggtagtcctagggtcaaatctcagatccacctctcactagccatctgactttaggtaagccttttaccactctaagcttccattttttcatgtttaaaatggaaataatgtctacctgacagcactattttatggatcaaataagatacatgtaaagcatttagcagcacagggcctggcacacaggaagtactccacaaaagtagctaacatagcattagtcaccagcctgagttgactggtgagggttaagccccaaatagttgcaacagatataaacaagaaataggctagacacagtggctcacacctgtaatcccaacatttggggaggccgaggctggaggatctcttgagcccaggaatccaagaccagcctaggcaatatagtggaaccctatctctacaaaaattatttttttttaattagccaggtgggtgggcgtggtggctcacgcctgtaatcccaacactttgggaggttgaggcaggcgggtcacctgaggtcgggagttcaagaccagcctgaccaggatggagaaaccccgtctctactaaaaatacaaaattagccaggcgtggtggcgcatgcctgtaatcccagcaattcaggaggctgaggtaggagaatcgctgaacctgggaggcagaggtgcagtgagccgagatcacgccattgcactctagcctaggcaacaagagcaaaactcggtctcaaaaaaaaaaaaaagaaagaaaaaaattagccaggtgtggtggcatgtgcttatagtctcagctactgaggagactgaggtgggaggatgacttgatcccaagaggctacaatgagccatgattgtgccactgcactccagcctgggtgatagagtgagaacctgcctcaaaaaaaaaaaaaaaaagaagaagaagaaatagatgcaaaaggtattatttatatattatatatatatatatatatatatatatggagggagaagcattatacaagaaacccactgggacatggctatgatcaaatatgggcaagggggaaaaaaggaggtaaagcaaagtctcaagcctggtatgttagtttccatctactgagatacagtgaagatgggattaaacatacgagataatttattggggaaaatgcctgtgagggaaagtaaggcgagagtgagaggaacctcagaccatgatgcagatctgattcctgtggaagagaaagagaggaaggaagttttagattgaagtgcagtttttgtttgtttgttttttgagacagagtctcactctgttgcccaggcttgagtgcagtatgtgatctcggctcactgaaacctctgccccccgggttcaagcgattctcctgcctcagcctctcaagtagctgggattataggcacctgccaccgcacccagctaaattttgtatttttagtagagatagggtttcaccatcttggccaggctggtcttgaactcctgacctcgtgatccaccctgcctcagcctcccaaagttctgggattacaggggtcagccaccgggcccggcctgcagtgcagttctaagagcatttctgcaaggctgacagggagtcctccagccattcacacttcagaataaaacagtcacacaaaactgggctagctttcatacccctgctgggagcctgtgggaagccagttctctatgcaaaagaggtggtgaattcagaatgcaccaactgccacaactgagacactgagaaaaagatgcaaccacgaaaaaggtggaaagttctaatcacatacaaaatagcaatcagcctttctcatatttcaaagccttaaaaatggctgagcgcagaaaagccagggtggaattggcagaagagagatcatcaacctagaaacatggtgactggggttgggcgcagtggctcacgcctataatccaagcactttgggaggccgaggcaggcggatcatgaggtcaggagttcaagaccagtctgaccaatatggtgaaaccccgtctctactaaaaaaatacagaaattagccaggtgtggtggcacgtgcctgtagtccagcctgagcaggagaatcgcttgttcctgggaggcggaggttgcagtgagccaagatcatgctactgcactccagcctgagagacagagcaagactctgtctcaaaaaaaaaaagaaaagaaaaaaagaaacatggtgattgaaaaaaaaaaattgcaaggatatagttagctaatcaccttccagcaaccttcccacaacgaaactgtattccttgaaggaacaattagaaactacttcattctgagagttgtttcccagcccccattgtaaaataatttcactttcatttcttctcctcttttctctccatgacagataatgctctaccacaagaaaatggcctctcacctggggccattgctggcattgtgattggagtagtggccctggttgctctgatagcagtagccctggcatgttttctgcatttcgggaagaccggcaggtatgatggccttt

SEQ ID NO: 28999 - DNA, 4523 bp, Homo Sapiens
ccgcggtgccgccgggaaagatggtcgtggcgctgcggtacgtgtggcctctcctcctctgcagcccctgcctgcttatccagatccccgaggaatatgaaggacaccatgtgatggagccacctgtcatcacggaacagtctccacggcgcctggttgtcttccccacagatgacatcagcctcaagtgtgaggccagtggcaagcccgaagtgcagttccgctggacgagggatggtgtccacttcaaacccaaggaagagctgggtgtgaccgtgtaccagtcgccccactctggctccttcaccatcacgggcaacaacagcaactttgctcagaggttccagggcatctaccgctgctttgccagcaataagctgggcaccgccatgtcccatgagatccggctcatggccgagggtgcccccaagtggccaaaggagacagtgaagcccgtggaggtggaggaaggggagtcagtggttctgccttgcaaccctcccccaagtgcagagcctctccggatctactggatgaacagcaagatcttgcacatcaagcaggacgagcgggtgacgatgggccagaacggcaacctctactttgccaatgtgctcacctccgacaaccactcagactacatctgccacgcccacttcccaggcaccaggaccatcattcagaaggaacccattgacctccgggtcaaggccaccaacagcatgattgacaggaagccgcgcctgctcttccccaccaactccagcagccacctggtggccttgcaggggcagccattggtcctggagtgcatcgccgagggctttcccacgcccaccatcaaatggctgcgccccagtggccccatgccagctgaccgtgtcacctaccagaaccacaacaagaccctgcagctgctgaaagtgggcgaggaggatgatggcgagtaccgctgcctggccgagaactcactgggcagtgcccggcatgcgtactatgtcaccgtggaggctgccccgtactggctgcacaagccccagagccatctatatgggccaggagagactgcccgcctggactgccaagtccagggcaggccccaaccagaggtcacctggagaatcaacgggatccctgtggaggagctggccaaagaccagaagtaccggattcagcgtggcgccctgatcctgagcaacgtgcagcccagtgacacaatggtgacccaatgtgaggcccgcaaccggcacgggctcttgctggccaatgcctacatctacgttgtccagctgccagccaagatcctgactgcggacaatcagacgtacatggctgtccagggcagcactgcctaccttctgtgcaaggccttcggagcgcctgtgcccagtgttcagtggctggacgaggatgggacaacagtgcttcaggacgaacgcttcttcccctatgccaatgggaccctgggcattcgagacctccaggccaatgacaccggacgctacttctgcctggctgccaatgaccaaaacaatgttaccatcatggctaacctgaaggttaaagatgcaactcagatcactcaggggccccgcagcacaatcgagaagaaaggttccagggtgaccttcacgtgccaggcctcctttgacccctccttgcagcccagcatcacctggcgtggggacggtcgagacctccaggagcttggggacagtgacaagtacttcatagaggatgggcgcctggtcatccacagcctggactacagcgaccagggcaactacagctgcgtggccagtaccgaactggatgtggtggagagtagggcacagctcttggtggtggggagccctgggccggtgccacggctggtgctgtccgacctgcacctgctgacgcagagccaggtgcgcgtgtcctggagtcctgcagaagaccacaatgcccccattgagaaatatgacattgaatttgaggacaaggaaatggcgcctgaaaaatggtacagtctgggcaaggttccagggaaccagacctctaccaccctcaagctgtcgccctatgtccactacacctttagggttactgccataaacaaatatggccccggggagcccagcccggtctctgagactgtggtcacacctgaggcagccccagagaagaaccctgtggatgtgaagggggaaggaaatgagaccaccaatatggtcatcacgtggaagccgctccggtggatggactggaacgccccccaggttcagtaccgcgtgcagtggcgccctcaggggacacgagggccctggcaggagcagattgtcagcgaccccttcctggtggtgtccaacacgtccaccttcgtgccctatgagatcaaagtccaggccgtcaacagccagggcaagggaccagagccccaggtcactatcggctactctggagaggactacccccaggcaatccctgagctggaaggcattgaaatcctcaactcaagtgccgtgctggtcaagtggcggccggtggacctggcccaggtcaagggccacctccgcggatacaatgtgacgtactggagggagggcagtcagaggaagcacagcaagagacatatccacaaagaccatgtggtggtgcccgccaacaccaccagtgtcatcctcagtggcttgcggccctatagctcctaccacctggaggtgcaggcctttaacgggcgaggatcggggcccgccagcgagttcaccttcagcaccccagagggagtgcctggccaccccgaggcgttgcacctggagtgccagtcgaacaccagcctgctgctgcgctggcagcccccactcagccacaacggcgtgctcaccggctacgtgctctcctaccaccccctggatgaggggggcaaggggcaactgtccttcaaccttcgggaccccgaacttcggacacacaacctgaccgatctcagcccccacctgcggtaccgcttccagcttcaggccaccaccaaagagggccctggtgaagccatcgtacgggaaggaggcactatggccttgtctgggatctcagattttggcaacatctcagccacagcgggtgaaaactacagtgtcgtctcctgggtccccaaggagggccagtgcaacttcaggttccatatcttgttcaaagccttgggagaagagaagggtggggcttccctttcgccacagtatgtcagctacaaccagagctcctacacgcagtgggacctgcagcctgacactgactacgagatccacttgtttaaggagaggatgttccggcaccaaatggctgtgaagaccaatggcacaggccgcgtgaggctccctcctgctggcttcgccactgagggctggttcatcggctttgtgagtgccatcatcctcctgctcctcgtcctgctcatcctctgcttcatcaagcgcagcaagggcggcaaatactcagtgaaggataaggaggacacccaggtggactctgaggcccgaccgatgaaagatgagaccttcggcgagtacaggtccctggagagtgacaacgaggagaaggcctttggcagcagccagccatcgctcaacggggacatcaagcccctgggcagtgacgacagcctggccgattatgggggcagcgtggatgttcagttcaacgaggatggttcgttcattggccagtacagtggcaagaaggagaaggaggcggcagggggcaatgacagctcaggggccacttcccccatcaaccctgccgtggccctagaatagtggagtacggacaggagatgctgtgccccctggccttgggatccaggcccctccctctccagcaggcccatgggaggctggagttggggcagaggagaacttgctgcctcggatccccttcctaccacccggtccccactttattgccaaaacccagctgcaccccttcctgggcacacgctgctctgccccagcttgggcagatctcccacatgccaggggcctttgggtgctgttttgccagcccatttgggcagagaggctgtggtttgggggagaagaagtaggggtggcccgaaaggtctccgaaatgctgtctttcttgctccctgactgggggcagacatggtggggtctcctcaggaccagggttggcaccttccccctcccccagccaccactccagcagcctggctgggactgggaacagaactcgtgtccccaccatctgctgtcttttctttgccatctctgctccaaccgggatggcagccgggcaaactggccgcgggggcaggggaggccatctggagagcccagagtccccccactcccagcatcgcactctggcagcaccgcctcttcccgccgcccagcccaccccatggccggctttcaggagctccatacacacgctgccttcggtacccaccacacaacatccaagtggcctccgtcactacctggctgcggggcgggcacacctcctcccactgcccactggccggc

SEQ ID NO: 29000 - DNA, 3101 bp, Homo Sapiens
gccgccgccatccgccgccgcagccagcttccgccgccgcaggaccggcccctgccccagcctcgcagccgcggcgtccacgcccgcccgcgcccagggcgagtcggggtcgccgcctgcacgcttctcagtgttccccgcgccccgcatgtaacccggccaggcccccgcaactgtgtcccctgcagctccagccccgggctgcacccccccgccccgacaccagctctccagcctgctcgtccaggatggccgcggccaaggccgagatgcagctgatgtccccgctgcagatctctgacccgttcggatcctttcctcactcgcccaccatggacaactaccctaagctggaggagatgatgctgctgagcaacggggctccccagttcctcggcgccgccggggccccagagggcagcggcagcaacagcagcagcagcagcagcgggggcggtggaggcggcgggggcggcagcaacagcagcagcagcagcagcaccttcaaccctcaggcggacacgggcgagcagccctacgagcacctgaccgcagagtcttttcctgacatctctctgaacaacgagaaggtgctggtggagaccagttaccccagccaaaccactcgactgccccccatcacctatactggccgcttttccctggagcctgcacccaacagtggcaacaccttgtggcccgagcccctcttcagcttggtcagtggcctagtgagcatgaccaacccaccggcctcctcgtcctcagcaccatctccagcggcctcctccgcctccgcctcccagagcccacccctgagctgcgcagtgccatccaacgacagcagtcccatttactcagcggcacccaccttccccacgccgaacactgacattttccctgagccacaaagccaggccttcccgggctcggcagggacagcgctccagtacccgcctcctgcctaccctgccgccaagggtggcttccaggttcccatgatccccgactacctgtttccacagcagcagggggatctgggcctgggcaccccagaccagaagcccttccagggcctggagagccgcacccagcagccttcgctaacccctctgtctactattaaggcctttgccactcagtcgggctcccaggacctgaaggccctcaataccagctaccagtcccagctcatcaaacccagccgcatgcgcaagtaccccaaccggcccagcaagacgcccccccacgaacgcccttacgcttgcccagtggagtcctgtgatcgccgcttctcccgctccgacgagctcacccgccacatccgcatccacacaggccagaagcccttccagtgccgcatctgcatgcgcaacttcagccgcagcgaccacctcaccacccacatccgcacccacacaggcgaaaagcccttcgcctgcgacatctgtggaagaaagtttgccaggagcgatgaacgcaagaggcataccaagatccacttgcggcagaaggacaagaaagcagacaaaagtgttgtggcctcttcggccacctcctctctctcttcctacccgtccccggttgctacctcttacccgtccccggttactacctcttatccatccccggccaccacctcatacccatcccctgtgcccacctccttctcctctcccggctcctcgacctacccatcccctgtgcacagtggcttcccctccccgtcggtggccaccacgtactcctctgttccccctgctttcccggcccaggtcagcagcttcccttcctcagctgtcaccaactccttcagcgcctccacagggctttcggacatgacagcaaccttttctcccaggacaattgaaatttgctaaagggaaaggggaaagaaagggaaaagggagaaaaagaaacacaagagacttaaaggacaggaggaggagatggccataggagaggagggttcctcttaggtcagatggaggttctcagagccaagtcctccctctctactggagtggaaggtctattggccaacaatcctttctgcccacttccccttccccaattactattccctttgacttcagctgcctgaaacagccatgtccaagttcttcacctctatccaaagaacttgatttgcatggattttggataaatcatttcagtatcatctccatcatatgcctgaccccttgctcccttcaatgctagaaaatcgagttggcaaaatggggtttgggcccctcagagccctgccctgcacccttgtacagtgtctgtgccatggatttcgtttttcttggggtactcttgatgtgaagataatttgcatattctattgtattatttggagttaggtcctcacttgggggaaaaaaaaaaaagaaaagccaagcaaaccaatggtgatcctctattttgtgatgatgctgtgacaataagtttgaacctttttttttgaaacagcagtcccagtattctcagagcatgtgtcagagtgttgttccgttaacctttttgtaaatactgcttgaccgtactctcacatgtggcaaaatatggtttggtttttctttttttttttttttgaaagtgttttttcttcgtccttttggtttaaaaagtttcacgtcttggtgccttttgtgtgatgcgccttgctgatggcttgacatgtgcaattgtgagggacatgctcacctctagccttaaggggggcagggagtgatgatttgggggaggctttgggagcaaaataaggaagagggctgagctgagcttcggttctccagaatgtaagaaaacaaaatctaaaacaaaatctgaactctcaaaagtctatttttttaactgaaaatgtaaatttataaatatattcaggagttggaatgttgtagttacctactgagtaggcggcgatttttgtatgttatgaacatgcagttcattattttgtggttctattttactttgtacttgtgtttgcttaaacaaagtgactgtttggcttataaacacattgaatgcgctttattgcccatgggatatgtggtgtatatccttccaaaaaattaaaacgaaaataaagt

SEQ ID NO: 29001 - DNA, 4051 bp, Homo Sapiens
ttacccttcctaaagtggaaggtgacctcaagggcccagaagctgacatcaagggcccaaaagtggacatcaacacccctgatgtggatgttcatggcccagactggcacctgaagatgcccaaggtgaaaatgcccaaattcagcatgcctggcttcaaaggagaaggtccagatgtggatgtgaacctgcccaaggctgacattgatgtctcaggacccaaagtggacgttgatgttcctgatgtgaatatcgaaggtccagatgcgaaactaaagggccccaagttcaagatgcctgagatgagcatcaaagcccccaagatctccatgcctgatattgacttaaacctgaaaggacccaaagtgaagggtgatgtggatgttacccttcctaaagtggaaggtgacctcaagggcccagaagctgacatcaagggcccaaaagtggacatcaacacccctgatgtggatgttcatggcccagactggcacctgaagatgcccaaggtgaaaatgcccaaattcagcatgcctggcttcaaaggagaaggtccagatgtggatgtgagcctgcccaaggccgacatcgatgtctcgggacccaaggtggacgttgatattccagatgtgaatatcgaaggtccagacccaaaactgaaggtccccaaggtcaagatgcctgaaataaatatcaaagctcccaagatctccatacctgatgttgacctggatttgaaaggacccaaagtaaaaggagattttgatgtgtctgtccctaaggttgaagggactttgaaaggcccagaagtagatcttaaaggtccacgtctggatttcgaaggccctgatgccaaactcagtggcccatctttgaagatgccatcgctggagatatctgctcctaaagtaactgctcctgatgttgatttgcatctcaaggcaccaaaaattggattttcaggtccgaagttagaaggtggtgaagtggacctcaagggacccaaagttgaagctccaagcttagatgtacacatggacagcccagatattaacatcgaagggccagatgttaaaatccccaaatttaagaaacccaagtttggatttgggccaaaaagccccaaagctgacatcaagtcaccttcactggatgtcactgttcctgaggcagagctgaaccttgagactcctgaaattagtgttggtggcaagggcaagaaaagtaagtttaaaatgcctaaaattcatatgagtggtcctaagattaaggccaaaaaacagggatttgacctgaatgttcctgggggtgaaattgatgccagcctcaaggctccggatgtagatgtcaacatcgcagggccggatgctgcactcaaagtcgacgtgaaatcgcccaaaaccaagaaaacgatgtttggaaaaatgtacttcccagatgtagagtttgacattaaatcacctaaatttaaagctgaggcccctctccctagccccaaactggagggtgaactccaggcacctgatctggaactttctttgccagcgattcacgtcgaaggtcttgacatcaaggcgaaggctcccaaggtcaagatgccagatgtggacatctcagtgccaaaaatagagggtgacctgaaaggccccaaagtgcaggcaaacttgggtgcacctgacatcaacatcgaaggcctagatgctaaagtcaaaacaccgtccttcggcatttctgcccctcaagtctccatccctgatgtgaatgtaaacttgaaaggaccaaagataaagggtgatgtccccagcgtgggactggaaggaccagatgtagatctgcaaggtccagaagcaaaaattaagttccccaagttttccatgcccaagatcggcatcccaggtgtgaaaatggagggtgggggagccgaggtccatgcccagctaccctctcttgaaggagacttgagaggaccagatgttaagctcgaagggcccgatgtttctctaaaggggccaggagtagacttaccttcagtgaacctctctatgccaaaagtctctgggcctgaccttgatctgaacttgaaaggaccaagtttgaagggagacctggatgcatctgttcccagcatgaaggtgcatgctccagggctcaacctcagtggtgtcggtggcaaaatgcaggtgggaggagacggtgtgaaagtgccagggatcgatgccacaacaaagcttaacgttggggcaccagatgtgacactgaggggaccaagcctgcagggagatctggctgtctctggtgacatcaaatgccctaaagtatccgtaggagctcctgatctaagcttggaggcatccgaaggcagcattaaacttcccaaaatgaagctgccccaatttggtatctctactccggggtccgacttgcacgtcaatgccaaggggccacaggtttctggcgaactgaaggggccaggtgtggatgtgaacctgaaagggtctcggatttcagcaccgaatgtggactttaacttggaaggaccaaaagtgaaagggagccttggggccactggtgagatcaaaggccccactgtcggaggaggtcttccaggcattggtgttcaaggcctagaaggaaacctccagatgcctggaattaagtcctctggatgtgatgtgaacctgccaggcgtgaatgtgaaactcccaactgggcagatttctgggcctgaaatcaaaggtggtctgaaaggttcagaagtaggtttccatggggctgctcctgatatcagtgtgaaggggcctgcctttaatatggcatctcctgagtcagattttggcatcaacttgaagggcccaaaaatcaaaggaggtgcggatgtttcagggggtgtcagtgccccagacatcagccttggtgaagggcatttgagtgttaaaggttccgggggtgagtggaagggaccccaagtctcctctgctctcaacttggacacatctaagtttgctgggggccttcatttctcaggaccaaaggtggaaggaggtgtgaaaggaggtcagattggactccaggctcctgggctgagtgtgtctgggcctcaaggtcacttggaaagtggatctggaaaagtaacattccctaaaatgaagatccccaaatttaccttctctggccgtgagctggttggcagagaaatgggggtggatgttcacttccctaaagcagaggccagcatccaagctggtgctggagacggcgagtgggaagagtctgaagtcaaactgaaaaagtccaagatcaaaatgcccaagtttaatttttccaaacctaaagggaaaggtggtgtcactggctcaccagaagcatcaatttctgggtccaaaggtgacctgaaaagttcaaaggccagcctgggctctctggaaggagaggcagaggccgaagcctcttcaccgaaaggcaaattctccttatttaaaagtaagaagccacggcaccgctcaaattcattcagtgatgaaagagagttctctggaccttccaccccgacggggacgctggagtttgaaggtggggaagtgtctctggaaggtgggaaagttaaagggaaacacgggaagctgaaattcggtacctttggtggattggggtcaaagagcaaaggtcattatgaggtgactgggagcgatgatgagacaggcaagttacaggggagtggggtgtccctggcctctaagaagtcccgactgtcctcctcttctagcaatgacagtgggaataaggttggcatccagcttcccgaggtggagctgtcagtttccacaaagaaagagtagcaggcctttgtatgtgtgtacatatatatatatataacaaaacatcagccttgggtggtgtgttcctatataaactccaaagggaaacacaccgactgcctcagcaatcatgcaaagaccttgcctggcccggtggcaagcgctgaaaaaccgaccgcctgtaggctcctggaactatacagataggtaaagagttccaagttcgtccggaattc

SEQ ID NO: 29002 - DNA, 2460 bp, Homo Sapiens
cggggcggagcctagggaagcaaattctcctggcggcctccgttcagacgcggcagctgtgacccacctgcctcctccgcagagcaatggcggtgtctgccgggtccgcgcggacctcgcccagctcagataaagtacagaaagacaaggctgaactgatctcagggcccaggcaggacagccgaatagggaaactcttgggttttgagtggacagatttgtccagttggcggaggctggtgaccctgctgaatcgaccaacggaccctgcaagcttagctgtctttcgttttctttttgggttcttgatggtgctagacattccccaggagcgggggctcagctctctggaccggaaataccttgatgggctggatgtgtgccgcttccccttgctggatgccctacgcccactgccacttgactggatgtatcttgtctacaccatcatgtttctgggggcactgggcatgatgctgggcctgtgctaccggataagctgtgtgttattcctgctgccatactggtatgtgtttctcctggacaagacatcatggaacaaccactcctatctgtatgggttgttggcctttcagctaacattcatggatgcaaaccactactggtctgtggacggtctgctgaatgcccataggaggaatgcccacgtgcccctttggaactatgcagtgctccgtggccagatcttcattgtgtacttcattgcgggtgtgaaaaagctggatgcagactgggttgaaggctattccatggaatatttgtcccggcactggctcttcagtcccttcaaactgctgttgtctgaggagctgactagcctgctggtcgtgcactggggtgggctgctgcttgacctctcagctggtttcctgctcttttttgatgtctcaagatccattggcctgttctttgtgtcctacttccactgcatgaattcccagcttttcagcattggtatgttctcctacgtcatgctggccagcagccctctcttctgctcccctgagtggcctcggaagctggtgtcctactgcccccaaaggttgcaacaactgttgcccctcaaggcagcccctcagcccagtgtttcctgtgtgtataagaggagccggggcaaaagtggccagaagccagggctgcgccatcagctgggagctgccttcaccctgctctacctcctggagcagctattcctgccctattctcattttctcacccagggctataacaactggacaaatgggctgtatggctattcctgggacatgatggtgcactcccgttcccaccagcacgtgaagatcacctaccgtgatggccgcactggcgaactgggctaccttaaccctggggtatttacacagagtcggcgatggaaggatcatgcagacatgctgaagcaatatgccacttgcctgagccgcctgcttcccaagtataatgtcactgagccccagatctactttgatatttgggtctccatcaatgaccgcttccagcagaggatttttgaccctcgtgtggacatcgtgcaggccgcttggtcaccctttcagcgcacatcctgggtgcaaccactcttgatggacctgtctccctggagggccaagttacaggaaatcaagagcagcctagacaaccacactgaggtggtcttcattgcagatttccctggactgcacttggagaattttgtgagtgaagacctgggcaacactagcatccagctgctgcagggggaagtgactgtggagcttgtggcagaacagaagaaccagactcttcgagagggagaaaaaatgcagttgcctgctggtgagtaccataaggtgtatacgacatcacctagcccttcttgctacatgtacgtctatgtcaacactacagagcttgcactggagcaagacctggcatatctgcaagaattaaaggaaaaggtggagaatggaagtgaaacagggcctctacccccagagctgcagcctctgttggaaggggaagtaaaagggggccctgagccaacacctctggttcagacctttcttagacgccaacaaaggctccaggagattgaacgccggcgaaatactcctttccatgagcgattcttccgcttcttgttgcgaaagctctatgtctttcgccgcagcttcctgatgacttgtatctcacttcgaaatctgatattaggccgtccttccctggagcagctggcccaggaggtgacttatgcaaacttgagaccctttgaggcagttggagaactgaatccctcaaacacggattcttcacattctaatcctcctgagtcaaatcctgatcctgtccactcagagttctgaagggggccagatgttgggtgcagatgtagaagcagccagtcacagacccattctatgcaatggacatttatttgaaaaaaaaaaaaaaaaaaaaaaa

SEQ ID NO: 29003 - DNA, 1981 bp, Homo Sapiens
agacaagatttttcaagcaagatgaagtccatcatcctctttgtcctttccctgctccttatcttggagaagcaagcagctgtgatgggacaaaaaggtggatcaaaaggccaattgccaagcggatcttcccaatttccacatggacaaaagggccagcactattttggacaaaaagaccaacaacatactaaatccaaaggcagtttttctattcaacacacatatcatgtagacatcaatgatcatgactggacccgaaaaagtcagcaatatgatttgaatgccctacataaggcgacaaaatcaaaacaacacctaggtggaagtcaacaactgctcaattataaacaagaaggcagagaccatgataaatcaaaaggtcattttcacatgatagttatacatcataaaggaggccaagctcatcatgggacacaaaatccttctcaagatcaggggaatagcccatctggaaagggattatccagtcaatgttcaaacacagaaaaaaggctatgggttcatggactaagtaaagaacaagcttcagcctctggtgcacaaaaaggtagaacacaaggtggatcccaaagcagttatgttctccaaactgaagaactagtagttaacaaacaacaacgtgagactaaaaattctcatcaaaataaagggcattaccaaaatgtggttgacgtgagagaggaacattcaagtaaactacaaacttcactccatcctgcacatcaagacagactccaacatggacccaaagacatttttactacccaagatgagctcctagtatataacaagaatcaacaccagacaaaaaatctcagtcaagatcaagagcatggccggaaggcacataaaatatcatacccgtcttcacgtacagaagaaagacaacttcaccatggagaaaagagtgtacagaaagatgtatccaaaggcagcatttctatccaaactgaagagaaaatacatggcaagtctcaaaaccaggtaacaattcatagtcaagatcaagagcatggccataaggaaaataaaatatcataccaatcttcaagtacagaagaaagacatctcaactgtggagaaaagggcatccagaaaggtgtatccaaaggcagtatttcgatccaaactgaagagcaaatacatggcaagtctcaaaaccaggtaagaattcctagtcaagctcaagagtatggccataaggaaaataaaatatcataccaatcttcgagtacagaagaaagacgtctcaacagtggagaaaaggatgtacagaaaggtgtatccaaaggcagtatttctatccaaactgaagagaaaatacatggcaagtctcaaaaccaggtaacaattcctagtcaagatcaagagcatggccataaggaaaataaaatgtcataccaatcttcaagtacagaagaaagacgactcaactatggaggaaagagcacgcagaaagatgtatcccaaagcagtatttctttccaaattgaaaagctagtagaaggcaagtctcaaatccagacaccaaatcctaatcaagatcaatggtctggccaaaatgcaaaaggaaagtctggtcaatctgcagatagcaaacaagacctactcagtcatgaacaaaaaggcagatacaaacaggaatccagtgagtcacataatattgtaattactgagcatgaggttgcccaagatgatcatttgacacaacaatataatgaagacagaaatccaatatctacatagccctgttgcttagcaaccacttgaaaagctggaccaatagcaaggtgtcacccgacctcagtgaagtctttgatgtttctgagaggcagactcccatgtggtcccagatccttggtccatggatgacaccaccttcccatgcttccttgcattaggctttctaaacccggagccccttcaaacttccaataaagggatcattttctgcttt

SEQ ID NO: 29004 - DNA, 8959 bp, Homo Sapiens
ccccagcctccttgccaacgccccctttccctctccccctcccgctcggcgctgaccccccatccccacccccgtgggaacactgggagcctgcactccacagaccctctccttgcctcttccctcacctcagcctccgctccccgccctcttcccggcccagggcgccggcccacccttccctccgccgccccccggccgcggggaggacatggccgcgcacaggccggtggaatgggtccaggccgtggtcagccgcttcgacgagcagcttccaataaaaacaggacagcagaacacacataccaaagtcagtactgagcacaacaaggaatgtctaatcaatatttccaaatacaagttttctttggttataagcggcctcactactattttaaagaatgttaacaatatgagaatatttggagaagctgctgaaaaaaatttatatctctctcagttgattatattggatacactggaaaaatgtcttgctgggcaaccaaaggacacaatgagattagatgaaacgatgctggtcaaacagttgctgccagaaatctgccattttcttcacacctgtcgtgaaggaaaccagcatgcagctgaacttcggaattctgcctctggggttttattttctctcagctgcaacaacttcaatgcagtctttagtcgcatttctaccaggttacaggaattaactgtttgttcagaagacaatgttgatgttcatgatatagaattgttacagtatatcaatgtggattgtgcaaaattaaaacgactcctgaaggaaacagcatttaaatttaaagccctaaagaaggttgcgcagttagcagttataaatagcctggaaaaggcattttggaactgggtagaaaattatccagatgaatttacaaaactgtaccagatcccacagactgatatggctgaatgtgcagaaaagctatttgacttggtggatggttttgctgaaagcaccaaacgtaaagcagcagtttggccactacaaatcattctccttatcttgtgtccagaaataatccaggatatatccaaagacgtggttgatgaaaacaacatgaataagaagttatttctggacagtctacgaaaagctcttgctggccatggaggaagtaggcagctgacagaaagtgctgcaattgcctgtgtcaaactgtgtaaagcaagtacttacatcaattgggaagataactctgtcattttcctacttgttcagtccatggtggttgatcttaagaacctgctttttaatccaagtaagccattctcaagaggcagtcagcctgcagatgtggatctaatgattgactgccttgtttcttgctttcgtataagccctcacaacaaccaacactttaagatctgcctggctcagaattcaccttctacatttcactatgtgctggtaaattcactccatcgaatcatcaccaattccgcattggattggtggcctaagattgatgctgtgtattgtcactcggttgaacttcgaaatatgtttggtgaaacacttcataaagcagtgcaaggttgtggagcacacccagcaatacgaatggcaccgagtcttacatttaaagaaaaagtaacaagccttaaatttaaagaaaaacctacagacctggagacaagaagctataagtatcttctcttgtccatggtgaaactaattcatgcagatccaaagctcttgctttgtaatccaagaaaacaggggcccgaaacccaaggcagtacagcagaattaattacagggctcgtccaactggtccctcagtcacacatgccagagattgctcaggaagcaatggaggctctgctggttcttcatcagttagatagcattgatttgtggaatcctgatgctcctgtagaaacattttgggagattagctcacaaatgcttttttacatctgcaagaaattaactagtcatcaaatgcttagtagcacagaaattctcaagtggttgcgggaaatattgatctgcaggaataaatttcttcttaaaaataagcaggcagatagaagttcctgtcactttctccttttttacggggtaggatgtgatattccttctagtggaaataccagtcaaatgtccatggatcatgaagaattactacgtactcctggagcctctctccggaagggaaaagggaactcctctatggatagtgcagcaggatgcagcggaacccccccaatttgccgacaagcccagaccaaactagaagtggccctgtacatgtttctgtggaaccctgacactgaagctgttctggttgccatgtcctgtttccgccacctctgtgaggaagcagatatccggtgtggggtggatgaagtgtcagtgcataacctcttgcccaactataacacattcatggagtttgcctctgtcagcaatatgatgtcaacaggaagagcagcacttcagaaaagagtgatggcactgctgaggcgcattgagcatcccactgcaggaaacactgaggcttgggaagatacacatgcaaaatgggaacaagcaacaaagctaatccttaactatccaaaagccaaaatggaagatggccaggctgctgaaagccttcacaagaccattgttaagaggcgaatgtcccatgtgagtggaggaggatccatagatttgtctgacacagactccctacaggaatggatcaacatgactggcttcctttgtgcccttggaggagtgtgcctccagcagagaagcaattctggcctggcaacctatagcccacccatgggtccagtcagtgaacgtaagggttctatgatttcagtgatgtcttcagagggaaacgcagatacacctgtcagcaaatttatggatcggctgttgtccttaatggtgtgtaaccatgagaaagtgggacttcaaatacggaccaatgttaaggatctggtgggtctagaattgagtcctgctctgtatccaatgctatttaacaaattgaagaataccatcagcaagttttttgactcccaaggacaggttttattgactgataccaatactcaatttgtagaacaaaccatagctataatgaagaacttgctagataatcatactgaaggcagctctgaacatctagggcaagctagcattgaaacaatgatgttaaatctggtcaggtatgttcgtgtgcttgggaatatggtccatgcaattcaaataaaaacgaaactgtgtcaattagttgaagtaatgatggcaaggagagatgacctctcattttgccaagagatgaaatttaggaataagatggtagaatacctgacagactgggttatgggaacatcaaaccaagcagcagatgatgatgtaaaatgtcttacaagagatttggaccaggcaagcatggaagcagtagtttcacttctagctggtctccctctgcagcctgaagaaggagatggtgtggaattgatggaagccaaatcacagttatttcttaaatacttcacattatttatgaaccttttgaatgactgcagtgaagttgaagatgaaagtgcgcaaacaggtggcaggaaacgtggcatgtctcggaggctggcatcactgaggcactgtacggtccttgcaatgtcaaacttactcaatgccaacgtagacagtggtctcatgcactccataggcttaggttaccacaaggatctccagacaagagctacatttatggaagttctgacaaaaatccttcaacaaggcacagaatttgacacacttgcagaaacagtattggctgatcggtttgagagattggtggaactggtcacaatgatgggtgatcaaggagaactccctatagcgatggctctggccaatgtggttccttgttctcagtgggatgaactagctcgagttctggttactctgtttgattctcggcatttactctaccaactgctctggaacatgttttctaaagaagtagaattggcagactccatgcagactctcttccgaggcaacagcttggccagtaaaataatgacattctgtttcaaggtatatggtgctacctatctacaaaaactcctggatcctttattacgaattgtgatcacatcctctgattggcaacatgttagctttgaagtggatcctaccaggttagaaccatcagagagccttgaggaaaaccagcggaacctccttcagatgactgaaaagttcttccatgccatcatcagttcctcctcagaattcccccctcaacttcgaagtgtgtgccactgtttataccaggtggttagccagcgtttccctcagaacagcatcggtgcagtaggaagtgccatgttcctcagatttatcaatcctgccattgtctcaccgtatgaagcagggattttagataaaaagccaccacctagaatcgaaaggggcttgaagttaatgtcaaagatacttcagagtattgccaatcatgttctcttcacaaaagaagaacatatgcggcctttcaatgattttgtgaaaagcaactttgatgcagcacgcaggtttttccttgatatagcatctgattgtcctacaagtgatgcagtaaatcatagtctttccttcataagtgacggcaatgtgcttgctttacatcgtctactctggaacaatcaggagaaaattgggcagtatctttccagcaacagggatcataaagctgttggaagacgaccttttgataagatggcaacacttcttgcatacctgggtcctccagagcacaaacctgtggcagatacacactggtccagccttaaccttaccagttcaaagtttgaggaatttatgactaggcatcaggtacatgaaaaagaagaattcaaggctttgaaaacgttaagtattttctaccaagctgggacttccaaagctgggaatcctattttttattatgttgcacggaggttcaaaactggtcaaatcaatggtgatttgctgatataccatgtcttactgactttaaagccatattatgcaaagccatatgaaattgtagtggaccttacccataccgggcctagcaatcgctttaaaacagactttctctctaagtggtttgttgtttttcctggctttgcttacgacaacgtctccgcagtctatatctataactgtaactcctgggtcagggagtacaccaagtatcatgagcggctgctgactggcctcaaaggtagcaaaaggcttgttttcatagactgtcctgggaaactggctgagcacatagagcatgaacaacagaaactacctgctgccaccttggctttagaagaggacctgaaggtattccacaatgctctcaagctagctcacaaagacaccaaagtttctattaaagttggttctactgctgtccaagtaacttcagcagagcgaacaaaagtcctagggcaatcagtctttctaaatgacatttattatgcttcggaaattgaagaaatctgcctagtagatgagaaccagttcaccttaaccattgcaaaccagggcacgccgctcaccttcatgcaccaggagtgtgaagccattgtccagtctatcattcatatccggacccgctgggaactgtcacagcccgactctatcccccaacacaccaagattcggccaaaagatgtccctgggacactgctcaatatcgcattacttaatttaggcagttctgacccgagtttacggtcagctgcctataatcttctgtgtgccttaacttgtacctttaatttaaaaatcgagggccagttactagagacatcaggtttatgtatccctgccaacaacaccctctttattgtctctattagtaagacactggcagccaatgagccacacctcacgttagaatttttggaagagtgtatttctggatttagcaaatctagtattgaattgaaacacctttgtttggaatacatgactccatggctgtcaaatctagttcgtttttgcaagcataatgatgatgccaaacgacaaagagttactgctattcttgacaagctgataacaatgaccatcaatgaaaaacagatgtacccatctattcaagcaaaaatatggggaagccttgggcagattacagatctgcttgatgttgtactagacagtttcatcaaaaccagtgcaacaggtggcttgggatcaataaaagctgaggtgatggcagatactgctgtagctttggcttctggaaatgtgaaattggtttcaagcaaggttattggaaggatgtgcaaaataattgacaagacatgcttatctccaactcctactttagaacaacatcttatgtgggatgatattgctattttagcacgctacatgctgatgctgtccttcaacaattcccttgatgtggcagctcatcttccctacctcttccacgttgttactttcttagtagccacaggtccgctctcccttagagcttccacacatggactggtcattaatatcattcactctctgtgtacttgttcacagcttcattttagtgaagagaccaagcaagttttgagactcagtctgacagagttctcattacccaaattttacttgctgtttggcattagcaaagtcaagtcagctgctgtcattgccttccgttccagttaccgggacaggtcattctctcctggctcctatgagagagagacttttgctttgacatccttggaaacagtcacagaagctttgttggagatcatggaggcatgcatgagagatattccaacgtgcaagtggctggaccagtggacagaactagctcaaagatttgcattccaatataatccatccctgcaaccaagagctcttgttgtctttgggtgtattagcaaacgagtgtctcatgggcagataaagcagataatccgtattcttagcaaggcacttgagagttgcttaaaaggacctgacacttacaacagtcaagttctgatagaagctacagtaatagcactaaccaaattacagccacttcttaataaggactcgcctctgcacaaagccctcttttgggtagctgtggctgtgctgcagcttgatgaggtcaacttgtattcagcaggtaccgcacttcttgaacaaaacctgcatactttagatagtctccgtatattcaatgacaagagtccagaggaagtatttatggcaatccggaatcctctggagtggcactgcaagcaaatggatcattttgttggactcaatttcaactctaactttaactttgcattggttggacaccttttaaaagggtacaggcatccttcacctgctattgttgcaagaacagtcagaattttacatacactactaactctggttaacaaacacagaaattgtgacaaatttgaagtgaatacacagagcgtggcctacttagcagctttacttacagtgtctgaagaagttcgaagtcgctgcagcctaaaacatagaaagtcacttcttcttactgatatttcaatggaaaatgttcctatggatacatatcccattcatcatggtgacccttcctataggacactaaaggagactcagccatggtcctctcccaaaggttctgaaggataccttgcagccacctatccaactgtcggccagaccagtccccgagccaggaaatccatgagcctggacatggggcaaccttctcaggccaacactaagaagttgcttggaacaaggaaaagttttgatcacttgatatcagacacaaaggctcctaaaaggcaagaaatggaatcagggatcacaacaccccccaaaatgaggagagtagcagaaactgattatgaaatggaaactcagaggatttcctcatcacaacagcacccacatttacgtaaagtttcagtgtctgaatcaaatgttctcttggatgaagaagtacttactgatccgaagatccaggcgctgcttcttactgttctagctacactggtaaaatataccacagatgagtttgatcaacgaattctttatgaatacttagcagaggccagtgttgtgtttcccaaagtctttcctgttgtgcataatttgttggactctaagatcaacaccctgttatcattgtgccaagatccaaatttgttaaatccaatccatggaattgtgcagagtgtggtgtaccatgaagaatccccaccacaataccaaacatcttacctgcaaagttttggttttaatggcttgtggcggtttgcaggaccgttttcaaagcaaacacaaattccagactatgctgagcttattgttaagtttcttgatgccttgattgacacgtacctgcctggaattgatgaagaaaccagtgaagaatccctcctgactcccacatctccttaccctcctgcactgcagagccagcttagtatcactgccaaccttaacctttctaattccatgacctcacttgcaacttcccagcattccccaggaatcgacaaggagaacgttgaactctcccctaccactggccactgtaacagtggacgaactcgccacggatccgcaagccaagtgcagaagcaaagaagcgctggcagtttcaaacgtaatagcattaagaagatcgtgtgaagcttgcttgctttcttttttaaaatcaacttaacatgggctcttcactagtgaccccttccctgtccttgccctttccccccatgttgtaatgctgcacttcctgttttataatgaacccatccggtttgccatgttgccagatgatcaactcttcgaagccttgcctaaatttaatgctgccttttctttaactttttttcttctacttttggcgtgtatctggtatatgtaagtgttcagaacaactgcaaagaaagtgggaggtcaggaaacttttaactgagaaat

SEQ ID NO: 29005 - DNA, 2314 bp, Homo Sapiens
ggaattcccgcccggcccggccccgcgccccgcagccccgggcgccgcgcgtcctgcccggcctgcggcccagcccttgcgccgctcgtccgacccgcgatcgtccaccagaccgtgcctcccggccgcccgggccccgcgtgcatgcttcggtctgggccagcctctgggccgtccgtccccactggccgggccatgccgagtcgccgcgtcgccagaccgccggctgcgccggagctgggggccttagggtcccccgacctctcctcactctcgctcgccgtttccaggagcacagatgaattggagatcatcgacgagtacatcaaggagaacggcttcggcctggacgggggacagccgggcccgggcgaggggctgccacgcctggtgtctcgcggggctgcgtccctgagcacggtcaccctgggccctgtggcgcccccagccacgccgccgccttggggctgccccctgggccgactagtgtccccagcgccgggcccgggcccgcagccgcacctggtcatcacggagcagcccaagcagcgcggcatgccgttccgctacgagtgcgagggccgctcggccggcagcatccttggggagagcagcaccgaggccagcaagacgctgcccgccatcgagctccgggattgtggagggctgcgggaggtggaggtgactgcctgcctggtgtggaaggactggcctcaccgagtccacccccacagcctcgtggggaaagactgcaccgacggcatctgcagggtgcggctccggcctcacgtcagcccccggcacagttttaacaacctgggcatccagtgtgtgaggaagaaggagattgaggctgccattgagcggaagattcaactgggcattgacccctacaacgctgggtccctgaagaaccatcaggaagtagacatgaatgtggtgaggatctgcttccaggcctcatatcgggaccagcagggacagatgcgccggatggatcctgtgctttccgagcccgtctatgacaagaaatccacaaacacatcagagctgcggatttgccgaattaacaaggaaagcgggccgtgcaccggtggcgaggagctctacttgctctgcgacaaggtgcagaaagaggacatatcagtggtgttcagcagggcctcctgggaaggtcgggctgacttctcccaggccgacgtgcaccgccagattgccattgtgttcaagacgccgccctacgaggacctggagattgtcgagcccgtgacagtcaacgtcttcctgcagcggctcaccgatggggtctgcagcgagccattgcctttcacgtacctgcctcgcgaccatgacagctacggcgtggacaagaaggcgaaacgggggatgcccgacgtccttggggagctgaacagctctgacccccatggcatcgagagcaaacggcggaagaaaaagccggccatcctggaccacttcctgcccaaccacggctcaggcccgttcctcccgccgtcagccctgctgccagaccctgacttcttctctggcaccgtgtccctgcccggcctggagccccctggcgggcctgacctcctggacgatggctttgcctacgaccctacggcccccacactcttcaccatgctggacctgctgcccccggcaccgccacacgctagcgctgttgtgtgcagcggaggtgccggggccgtggttggggagacccccggccctgaaccactgacactggactcgtaccaggccccgggccccggggatggaggcaccgccagccttgtgggcagcaacatgttccccaatcattaccgcgaggcggcctttgggggcggcctcctatccccggggcctgaagccacgtagccccgcgatgccagaggaggggcactgggtggggagggaggtggaggagccgtgcaatcccaaccaggatgtctagcacccccatccccttggcccttcctcatgcttctgaagtggacatattcagccttggcgagaagctccgttgcacgggtttccccttgagcccattttacagatgaggaaactgagtccggagaggaaaagggacatggctcccgtgcactagcttgttacagctgcctctgtccccacatgtgggggcaccttctccagtaggattcggaaaagattgtacatatgggaggagggggcagattcctggccctccctccccagacttgacttgaaggtggggggtaggttggttgttcagagtcttcccaataaagatgagtttttgagcctcaaaaaaaaaaaaaggaattcc

SEQ ID NO: 29006 - DNA, 7193 bp, Homo Sapiens
agaataagggcagggaccgcggctcctatctcttggtgatccccttccccattccgcccccgcctcaacgcccagcacagtgccctgcacacagtagtcgctcaataaatgttcgtggatgatgatgatgatgatgatgaaaaaaatgcagcatcaacggcagcagcaagcggaccacgcgaacgaggcaaactatgcaagaggcaccagacttcctctttctggtgaaggaccaacttctcagccgaatagctccaagcaaactgtcctgtcttggcaagctgcaatcgatgctgctagacaggccaaggctgcccaaactatgagcacctctgcacccccacctgtaggatctctctcccaaagaaaacgtcagcaatacgccaagagcaaaaaacagggtaactcgtccaacagccgacctgcccgcgcccttttctgtttatcactcaataaccccatccgaagagcctgcattagtatagtggaatggaaaccatttgacatatttatattattggctatttttgccaattgtgtggccttagctatttacatcccattccctgaagatgattctaattcaacaaatcataacttggaaaaagtagaatatgccttcctgattatttttacagtcgagacatttttgaagattatagcgtatggattattgctacatcctaatgcttatgttaggaatggatggaatttactggattttgttatagtaatagtaggattgtttagtgtaattttggaacaattaaccaaagaaacagaaggcgggaaccactcaagcggcaaatctggaggctttgatgtcaaagccctccgtgcctttcgagtgttgcgaccacttcgactagtgtcaggggtgcccagtttacaagttgtcctgaactccattataaaagccatggttcccctccttcacatagcccttttggtattatttgtaatcataatctatgctattataggattggaactttttattggaaaaatgcacaaaacatgtttttttgctgactcagatatcgtagctgaagaggacccagctccatgtgcgttctcagggaatggacgccagtgtactgccaatggcacggaatgtaggagtggctgggttggcccgaacggaggcatcaccaactttgataactttgcctttgccatgcttactgtgtttcagtgcatcaccatggagggctggacagacgtgctctactgggtaaatgatgcgataggatgggaatggccatgggtgtattttgttagtctgatcatccttggctcatttttcgtccttaacctggttcttggtgtccttagtggagaattctcaaaggaaagagagaaggcaaaagcacggggagatttccagaagctccgggagaagcagcagctggaggaggatctaaagggctacttggattggatcacccaagctgaggacatcgatccggagaatgaggaagaaggaggagaggaaggcaaacgaaatactagcatgcccaccagcgagactgagtctgtgaacacagagaacgtcagcggtgaaggcgagaaccgaggctgctgtggaagtctctggtgctggtggagacggagaggcgcggccaaggcggggccctctgggtgtcggcggtggggtcaagccatctcaaaatccaaactcagccgacgctggcgtcgctggaaccgattcaatcgcagaagatgtagggccgccgtgaagtctgtcacgttttactggctggttatcgtcctggtgtttctgaacaccttaaccatttcctctgagcactacaatcagccagattggttgacacagattcaagatattgccaacaaagtcctcttggctctgttcacctgcgagatgctggtaaaaatgtacagcttgggcctccaagcatatttcgtctctcttttcaaccggtttgattgcttcgtggtgtgtggtggaatcactgagacgatcctggtggaactggaaatcatgtctcccctggggatctctgtgtttcggtgtgtgcgcctcttaagaatcttcaaagtgaccaggcactggacttccctgagcaacttagtggcatccttattaaactccatgaagtccatcgcttcgctgttgcttctgctttttctcttcattatcatcttttccttgcttgggatgcagctgtttggcggcaagtttaattttgatgaaacgcaaaccaagcggagcacctttgacaatttccctcaagcacttctcacagtgttccagatcctgacaggcgaagactggaatgctgtgatgtacgatggcatcatggcttacgggggcccatcctcttcaggaatgatcgtctgcatctacttcatcatcctcttcatttgtggtaactatattctactgaatgtcttcttggccatcgctgtagacaatttggctgatgctgaaagtctgaacactgctcagaaagaagaagcggaagaaaaggagaggaaaaagattgccagaaaagagagcctagaaaataaaaagaacaacaaaccagaagtcaaccagatagccaacagtgacaacaaggttacaattgatgactatagagaagaggatgaagacaaggacccctatccgccttgcgatgtgccagtaggggaagaggaagaggaagaggaggaggatgaacctgaggttcctgccggaccccgtcctcgaaggatctcggagttgaacatgaaggaaaaaattgcccccatccctgaagggagcgctttcttcattcttagcaagaccaacccgatccgcgtaggctgccacaagctcatcaaccaccacatcttcaccaacctcatccttgtcttcatcatgctgagcagcgctgccctggccgcagaggaccccatccgcagccactccttccggaacacgatactgggttactttgactatgccttcacagccatctttactgttgagatcctgttgaagatgacaacttttggagctttcctccacaaaggggccttctgcaggaactacttcaatttgctggatatgctggtggttggggtgtctctggtgtcatttgggattcaatccagtgccatctccgttgtgaagattctgagggtcttaagggtcctgcgtcccctcagggccatcaacagagcaaaaggacttaagcacgtggtccagtgcgtcttcgtggccatccggaccatcggcaacatcatgatcgtcactaccctcctgcagttcatgtttgcctgtatcggggtccagttgttcaaggggaagttctatcgctgtacggatgaagccaaaagtaaccctgaagaatgcaggggacttttcatcctctacaaggatggggatgttgacagtcctgtggtccgtgaacggatctggcaaaacagtgatttcaacttcgacaacgtcctctctgctatgatggcgctcttcacagtctccacgtttgagggctggcctgcgttgctgtataaagccatcgactcgaatggagagaacatcggcccaatctacaaccaccgcgtggagatctccatcttcttcatcatctacatcatcattgtagctttcttcatgatgaacatctttgtgggctttgtcatcgttacatttcaggaacaaggagaaaaagagtataagaactgtgagctggacaaaaatcagcgtcagtgtgttgaatacgccttgaaagcacgtcccttgcggagatacatccccaaaaacccctaccagtacaagttctggtacgtggtgaactcttcgcctttcgaatacatgatgtttgtcctcatcatgctcaacacactctgcttggccatgcagcactacgagcagtccaagatgttcaatgatgccatggacattctgaacatggtcttcaccggggtgttcaccgtcgagatggttttgaaagtcatcgcatttaagcctaaggggtattttagtgacgcctggaacacgtttgactccctcatcgtaatcggcagcattatagacgtggccctcagcgaagcggacccaactgaaagtgaaaatgtccctgtcccaactgctacacctgggaactctgaagagagcaatagaatctccatcacctttttccgtcttttccgagtgatgcgattggtgaagcttctcagcaggggggaaggcatccggacattgctgtggacttttattaagtcctttcaggcgctcccgtatgtggccctcctcatagccatgctgttcttcatctatgcggtcattggcatgcagatgtttgggaaagttgccatgagagataacaaccagatcaataggaacaataacttccagacgtttccccaggcggtgctgctgctcttcaggtgtgcaacaggtgaggcctggcaggagatcatgctggcctgtctcccagggaagctctgtgaccctgagtcagattacaaccccggggaggagtatacatgtgggagcaactttgccattgtctatttcatcagtttttacatgctctgtgcatttctgatcatcaatctgtttgtggctgtcatcatggataatttcgactatctgacccgggactggtctattttggggcctcaccatttagatgaattcaaaagaatatggtcagaatatgaccctgaggcaaagggaaggataaaacaccttgatgtggtcactctgcttcgacgcatccagcctcccctggggtttgggaagttatgtccacacagggtagcgtgcaagagattagttgccatgaacatgcctctcaacagtgacgggacagtcatgtttaatgcaaccctgtttgctttggttcgaacggctcttaagatcaagaccgaagggaacctggagcaagctaatgaagaacttcgggctgtgataaagaaaatttggaagaaaaccagcatgaaattacttgaccaagttgtccctccagctggtgatgatgaggtaaccgtggggaagttctatgccactttcctgatacaggactactttaggaaattcaagaaacggaaagaacaaggactggtgggaaagtaccctgcgaagaacaccacaattgccctacaggcgggattaaggacactgcatgacattgggccagaaatccggcgtgctatatcgtgtgatttgcaagatgacgagcctgaggaaacaaaacgagaagaagaagatgatgtgttcaaaagaaatggtgccctgcttggaaaccatgtcaatcatgttaatagtgataggagagattcccttcagcagaccaataccacccaccgtcccctgcatgtccaaaggccttcaattccacctgcaagtgatactgagaaaccgctgtttcctccagcaggaaattcggtgtgtcataaccatcataaccataattccataggaaagcaagttcccacctcaacaaatgccaatctcaataatgccaatatgtccaaagctgcccatggaaagcggcccagcattgggaaccttgagcatgtgtctgaaaatgggcatcattcttcccacaagcatgaccgggagcctcagagaaggtccagtgtgaaaagaacccgctattatgaaacttacattaggtccgactcaggagatgaacagctcccaactatttgccgggaagacccagagatacatggctatttcagggacccccactgcttgggggagcaggagtatttcagtagtgaggaatgctacgaggatgacagctcgcccacctggagcaggcaaaactatggctactacagcagatacccaggcagaaacatcgactctgagaggccccgaggctaccatcatccccaaggattcttggaggacgatgactcgcccgtttgctatgattcacggagatctccaaggagacgcctactacctcccaccccagcatcccaccggagatcctccttcaactttgagtgcctgcgccggcagagcagccaggaagaggtcccgtcgtctcccatcttcccccatcgcacggccctgcctctgcatctaatgcagcaacagatcatggcagttgccggcctagattcaagtaaagcccagaagtactcaccgagtcactcgacccggtcgtgggccacccctccagcaacccctccctaccgggactggacaccgtgctacacccccctgatccaagtggagcagtcagaggccctggaccaggtgaacggcagcctgccgtccctgcaccgcagctcctggtacacagacgagcccgacatctcctaccggactttcacaccagccagcctgactgtccccagcagcttccggaacaaaaacagcgacaagcagaggagtgcggacagcttggtggaggcagtcctgatatccgaaggcttgggacgctatgcaagggacccaaaatttgtgtcagcaacaaaacacgaaatcgctgatgcctgtgacctcaccatcgacgagatggagagtgcagccagcaccctgcttaatgggaacgtgcgtccccgagccaacggggatgtgggccccctctcacaccggcaggactatgagctacaggactttggtcctggctacagcgacgaagagccagaccctgggagggatgaggaggacctggcggatgaaatgatatgcatcaccaccttgtagcccccagcgaggggcagactggctctggcctcaggtggggcgcaggagagccaggggaaaagtgcctcatagttaggaaagtttaggcactagttgggagtaatattcaattaattagacttttgtataagagatgtcatgcctcaagaaagccataaacctggtaggaacaggtcccaagcggttgagcctggcagagtaccatgcgctcggccccagctgcaggaaacagcaggccccgccctctcacagaggatgggtgaggaggccagacctgccctgccccattgtccagatgggcactgctgtggagtctgcttctcccatgtaccagggcaccaggcccacccaactgaaggcatggcggcggggtgcaggggaaagttaaaggtgatgacgatcatcacacctcgtgtcgttacctcagccatcggtctagcatatcagtcactgggcccaacatatccatttttaaaccctttcccccaaatacactgcgtcctggttcctgtttagctgttctgaaata

SEQ ID NO: 29007 - DNA, 5133 bp, Homo Sapiens
ccgaagctccatgcaggcattcatggccgggctctgttctctctggcaggtggccaaggtggaatacgtcaggaagaagccaaaattaaaagaagtccaggtgaggttagaggagcatttggagtgcgcctgcgcgaccacaagcctgaatccggattatcgggaagaggacacgggtgagtggctgccttcgtcggcatcggtgttggagaacaggtcttcagagccttgcttttggggtgttaggtggcccccttgagcgcaacgcttactgctgtgagcatctgggctgctgttgaaggattcgttgatccctgctcccgggccagatgcctgcagggagacggatcccacacctgcaggtgtccggtggggagggtggcccaagctgcggcactggcaggagaggaggttcaggtctcactgagaggggctgggagtgcataagacacccaattcattagtgggctgcggggctgagctgagaagaatctgcagaagggcctcctgccagggtgggcgggaggagcaggttcgaggactgcagttgccctggctggctggggtctctccttcacccgccacgcggactccacccaggagcagaatggcttctgtgccctgctatggctgggccctgggagcatgaggggactcagaagtttctcggtgccagggtgctggccttctcttctggaaagataaacaaatgccgtaggtatttgttgcttcagttcttcaccccgacggccgtccctcggcccactcaccgccctgcccttttgttaacaggaaggcctagggagtcaggtaaaaaacggaaaagaaaaaggttaaaacccacctaaagcagccaaccaggtaggactgtctgccggacacactgagtcctgcagggcggggaggtgcaactgactgatcacaccagcaaatcacgcttcctgtctcgccgggtgcgcgggatgtggccctgattggccttgatggtgtctgctgggcttgggtctccttgctccccgtccgctcctgcctcgcagaacgccctggcccgtggctcactcccgcttgggagcctgcctccagctttgtccttctctttgtcgttgattggggatgcaggagcattgcacatgaatggaacaggttgggcgacctgagcagcggtggggcagctctgagcgcctggccactctgggatcacccaccccatttgacagatgaaaaaactgaggcttaactgagattacagataaggactgttggaggctgaatatatctggaaatccttataaacgtgcagggctgttggctactgtgttggaaattgcatttggctgctagtaacaccagacagcacagggattgagataagatcgagcttcatgactttcatctaagggtgggattgcagagcagggagggtagtcttgaggtatcatcagtgtccgccttctgtctggctagtggcatccatctgcagttgcctcatggcccagggtggctgctaaagctccagaaaccacatctgtgctccaggctggaagaaggagtgagcgggggggggggggggggggggaagggcaaaataacacccttagagagctatcctggaaatcccacccagtgacttttgtgtttttctcagctgccatccctccactgcaagggagcttgggaaatgtctcctagcaagacatgtcgcttcccagatggaggtgggacctggcagccgccatcatcacggaggaggcagtttcaagccttcctggtccttggcattggcccgtctggcttgggaaagttggagccctgtctggcctggttccccctcctggcacgtgggactccatggtggccaaaacaaatagtttctttagaagagaggaggatctcagagatagggtgtctgagaaccctggctcctgtttgcaatgtgggacttgggcctgcgggtgaggtccattcatgaggagcctcttgggaggaaattgtccacttgggcgggtctttgaagcagtccaggactgttggtcagccttggctttgtttgccgaaagtgtggcctggtgggtggttttgtgcctgcctgtgggtcccatttctacagagcgttaggctctggcctccatgggcctgctggtgacagaccccatggtgagaggctggcactcctgttgtcccatgcctggctggtactcatgttcagcctataggcagcccacgtgttggagtgtgcgatggagaggccacatgggatgtggaagaattgttcttaagcgatcagcataggtctgcctgggtgcagactcttctgtctggctggtggcctccatcctcagggttgtctcatggcccaaggtggctgccagagctccagaaatcacatctaagccctaggctggaagaaaggaaggcagagaagggcaaatgagccattcttggcctcagtttcccccatctgtacaatgggagaatggggcttggtctctagacatgttctgtgagatgctgtgagcctaatcccaattcctgtcagggtactgcaacatggccaatgtggcaaatgtgattctggaaatttcatgaaaacttgaaatccctgtgtgcccctgattgggttaaatgttttcaccctgttttcctcctgtgcagcgatgtgtgtgctgggtggttcacttggtcggtggtctcagtgtctgtctttcccttctccctgcagatgtgaggtgaggatgagccgcagccctttcctgggacatggatgtacatggcgtgttacattcctgaacctactatgtacggtgctttattgccagtgtgcggtctttgttctcctccgtgaaaaactgtgtccgagaacactcgggagaacaaagagacagtgcacatttgtttaatgtgacatcaaagcaagtattgtagcactcggtgaagcagtaagaagcttccttgtcaaaaagagagagagagagagagagagagaaaacaaaaccacaaatgacaaaaacaaaacggactcacaaaaatatctaaactcgatgagatggagggtcgccccgtgggatggaagtgcagaggtctcagcagactggatttctgtccgggtggtcacaggtgcttttttgccgaggatgcagagcctgctttgggaacgactccagaggggtgctggtgggctctgcaggggcccgcaggaagcaggaatgtcttggaaaccgccacgcgaactttagaaaccacacctcctcgctgtagtatttaagcccatacagaaaccttcctgagagccttaagtggttttttttttttgtttttgttttgttttttttttttttgttttttttttttttttttttacaccataaagtgattattaagctttcctttttactctttggctagctttttttttttttttttttaattatctcttggatgacatttacaccgataacacacaggctgctgtaactgtcaggacagtgcgacggtatttttcctagcaagatgcaaactaatgagatgtattaaaataaacatggtatacctacctatgcatcatttcctaaatgtttctggctttgtgtttctcccttaccctgctttatttgttaatttaagccattttgaaagaactatgcgtcaaccaatcgtacgccgtccctgcggcacctgccccagagcccgtttgtggctgagtgacaacttgttccccgcagtgcacacctagaatgctgtgttcccacgcggcacgtgagatgcattgccgcttctgtctgtgttgttggtgtgccctggtgccgtggtggcggtcactccctctgctgccagtgtttggacagaacccaaattctttatttttggtaagatattgtgctttacctgtattaacagaaatgtgtgtgtgtggtttgtttttttgtaaaggtgaagtttgtatgtttacttaatattacctgttttgtatacctgagagcctgctatgttctttttttgttgatccaaaattaaaaaaaaaaataccaccaacaaaacccgtggacgtgagaagcgttttgtggtacgtttttctagcactgagtctagaccctggttgccaggtcatgcggtgctgtgttgggtggaaacggaggtcagagctttctgggtggggtccctggacctgcctccatggtggcacccgtgggatgcctgcctacctcggacttcagcacctatgggggttaggccgaggacatcctcctgcaggctccactccctggagcggatgaggagtgtcagagtagccagaagaccatgaagagtttcatccaagaagggagcccacctgacttggtgtgtccatgtgcagcactcaccataccctgcccgggctggcccctccaccacctccaggcccacgagacaaaccatcgaggttgctttcaatcttgaccccgcgttcttcgaggaccatctgtggactggtggccggctggcgtctgttgtccatgtgctgctggaatgttcttatgaaggattatcttcaacagctcatcttcatggtgctgttttcagcctcgtcagggcagcctggaggctggaggggaagtgcagggccaggtggttgcaagctggttcctgttccttggacacctgctggggccctgcctgggcctgtgggctgctgtccagatctgcaccggttacagcgccttgcccaggaatgtgcattggatgtgacgtgtggcaatgtaacatgtatttgtttccatgagatgctggcgacaatgctccatttttcttttttgtataaagtcgtctggtgtaataccgtgtccattaaagtgatggggcagaaaagccaggtggggaagagagaattccataagaattccataggtctggagcccaggggtggctgaggtagcagtagaggtgggaactcaggcctgctttctctccctacttactccttccctccctcactccctccttttctccctcattggttcatccatgcaggcgagggccctagtgccagcccctcctgtcccgacatggggagagccctggggaggggcaggcagagtggaggccactccagccaggaagggctgcagtgtggcgggggctgtggtctgaggctggatc

SEQ ID NO: 29008 - DNA, 3956 bp, Homo Sapiens
ggctgaggcagccgcgcaggtcgcagggccagcgtccgcgaggacggcccggctgggcggccccgagctctgtggcgctgtggaggagcgggagcgcggccgaggaagcggggcgccgagggggtcggcggccttcgggaaatttccgccgacccttcgctcccggctctaaaagttcctgatttcctatttccttttaaatcccgagtggctgttagctcttcgcctgcactttttcttccccaggagataagggggagtgtgaggaacggagcgaataatataaaaaaggatttcctcccggaagagagcggcagttcggagagatttttcttaaggaagcagaagcggcgtttgcggccgctgcaggcgccgggccctgccggccacactatgcgcgagccggccccgggctgctgaggcgcggggacgcggaagcggaggccgagcgcgccgggctcccgcgctcgcgagcgagttttgtccgcccggcggcggtggcggggggatggagcccgcgaccgcgccccggcccgacatggcgccggagctgaccccggaggaggagcaggctaccaagcagtttctcgaagagattaacaagtggacagttcagtacaatgtttccccgctgtcttggaatgtggctgtcaagttcctcatggcaaggaagtttgatgtgctccgtgccatagaattgttccactcctacagagaaactcgaaggaaggaaggcattgtaaagctgaaacctcatgaggaacctcttcgttctgagatcctcagtggaaaattcaccatcttaaatgttcgggacccaacaggagcctccattgccctctttactgccaggttgcatcatccccacaagtcagtccaacatgtggtacttcaggctctgttttacttgctagacagagctgtggatagctttgaaactcagaggaatggactggtgtttatctatgacatgtgtggttctaattatgccaactttgagctggatcttggcaagaaagtcctaaacctgctgaagggagcatttccagctcgtttgaagaaggtgctgattgtgggggcacccatatggttccgagtgccctattccatcatcagtctcctcctgaaggacaaagtccgggagaggattcaaatattaaagacatctgaggtcacgcagcatctgcccagggagtgtcttccagaaaacctgggtgggtacgtcaaaattgatctcgccacttggaatttccagttcctaccccaggtgaacggccacccagatcccttcgatgagatcatcctgttctccctccctcctgccttagactgggactcagtacatgttccaggtccccatgctatgaccatccaagagttggtggactatgttaatgccaggcaaaagcaaggaatctatgaggaatatgaagacattcgtcgtgagaaccctgttggcactttccactgttccatgtctccaggaaacctagagaaaaaccgttatggggatgtaccctgcctggaccaaactagagtgaagctaacaaagcgaagtggccatactcagacagattacatcaatgccagtttcatggatggctacaagcagaagaatgcttacattggcacacaaggtcctttggagaatacctatcgtgatttctggctcatggtatgggagcaaaaagtcttggtgattgtcatgaccacccgctttgaggaaggcggcaggagaaagtgtggccagtactggcctttagaaaaagactctcggatccgatttggcttcctcacagtgaccaatctaggcgtggagaacatgaatcattataagaaaacaacgctagaaattcacaacacagaggaacggcagaaacgccaggtgacccacttccagttcttgagctggccagactatggtgtcccttcctcagcagcttccctcattgacttcttgagagtggtcagaaaccagcagagtctggctgtgagcaacatgggagcacgctccaaagggcagtgccctgagccacccattgtggtccattgcagtgcaggcattggcaggacaggtaccttctgctcactggacatctgcctggcacagctggaggagcttggcacccttaatgtgttccagacggtgtcacgcatgaggacccagagggccttcagcatccagacccctgagcagtactatttttgctacaaggccatcctggagttcgcagagaaggagggcatggtatcctctggccaaaacctgctggccgtggagagtcagtaactctcctacgaacctcctacctgttggccagccttccttaaactaccctggacaccgctgagcctataggttgccatcagttacgctgaagccatggatcaacttctttcttgtgtctcccagcacacgtgtgcacgcaaggcagcctttccctttggctagataaatgtggtgaaattgccactagaaagggccagtagcaatgtgttcttaattcctagcatctgctatcaaactgtgccttattaaaaccaaattgtggctattgatttttgctagggtccccgaggtaagtggggaaggaacctccctcctcctttctcccgccattctttttctgaggtctcctgtctcccactccttccctttcctaggattttatggggaggtttgatgagcatttgcctttctccccagagagcttgaccaagttacatattctagagatcgtcctgagtgccaagccagtttataagtagggcgtgtattccagtcctttctgtcattctgtgtgtgtgtgtgtgtgcacttatgtgtatgggtccatatgtacgtgtgtatataatatatattgtatgtgataatatgatcgtattctataaatacatatacacacgatactcctttccagaagttcctggggctccgtgttgcagttcaggactccttgcttcttggaccctactatttatcctggactagcttgggttggtgatcatgtctcctcttgtcaggctacagagtggtggaagaggacacacacacatctcctccatgttcctgccacagggccccttccttaagtaatgacttatctccttccagttgccacctgttggagccaagaatgtattagtttgtggtgacactgggttagctcagcatggatttcccttatccgatgatttttctacatttacttggccaatttggggaacagacctccactgtgattccatactctctctttgctttcactatcccagggatgggaggcggagggtagagatgaactcactgagcagccagagccaaatgcaatcggtacgaatcttagaaggaaggagggggagcccaggtatgagaaagaaaaaaccactaagaaaatacctccctgggaggatgagctggggccctttttcttttgctggatggttcctttatgcagcttggccctgtctaccgagatgcccatctcttcctgcctgctagcctgctagaccctcaaactgggtgggttctgtgtcaataaaaagcttcaccccctggctgagtgaggtggtcccctgcaatcactgtttgtcccctacccacccaacctgtccctgcctgctcccagcccactcatccttatgtgctagggataaatcaagagtcctcagcactccacattcccaaaaaatcccaggaactcctaaaccttcccctgtgacagaagatgaggttggcagctgatcagacctcaataattttatactgtaataagctctttgaatgtgtatattattatcttttacaatcatttcattttgtatttaatatcaatggactgagtctgattcagaaaataattgtaatgttcatattcaatatcttacagtgatacagttttgtatttacatataaatataccgacatgatcaaaaccaaaaaaaaaaaaaaaaaa

SEQ ID NO: 29009 - DNA, 1518 bp, Homo Sapiens
tccaacccacaggacttcgtggatggaatgcagttctgcagcagtggctttcaaggacttgacatccaccctccagctgggcccctctggatcctgggggatgtcttcattcgacagttttactcagtctttgaccgtgggaataaccgtgtgggactggccccagcagtcccctaaggaggggccttgtgtctgtgcctgcctgtctgacagaccttgaatatgttaggctggggcattctttacacctacaaaaagttattttccagagaatgtagctgtttccagggttgcaacttgaattaagaccaaacagaacatgagaatacacacacacacacacatatacacacacacacacttcacacatacacaccactcccaccaccgtcatgatggaggaattacgttatacattcatattttgtattgatttttgattatgaaaatcaaaaattttcacatttgattatgaaaatctccaaacatatgcacaagcagagatcatggtataataaatccctttgcaactccactcagccctgacaacccatccacacacggccaggcctgtttatctacactgctgcccactcctctctccagctccacatgctgtacctggatcattctgaagcaaattccgagcattacatcattttgtccataaatatttctaacatccttaaatatacaatcggaattcaagcatctcccattgtcccacaaatgtttggctgtttttgtagttggattgtttgtattaggattcaagcaaggcccatatattgcatttatttgaaatgtctgtaagtctctttccatctacagagtttagcacatttgaacgttgctggttgaaatcccgaggtgtcatttgacatggttctctgaacttatctttcctataaaatggtagttagatctggaggtctgattttgtggcaaaaatacttcctaggtggtgctgggtacttcttgttgcatcctgtcaggaggcagataatgctggtgcctctctattggtaatgttaagactgctgggtgggtttggagttcttggctttaatcattcattacaaagttcagcattttacctgatcgtttcagtggtcattgatgatcattgctgagatccacactataattaggggcggcagaacaggtgtttttctaattctgctatccctttggcatttgttagttggaattcttctataaaaaacataggccgggtacagtgctcacgcctgtaatcctagcactttcggaggccaaggcaggcagatcacgaggtcaagagatggagactatcctggccaacatggttaaaccccttctctactaaaagtacaaaaattagccaggcatggtggcacacgcctgtagtcccagctacccaggaagctgaggcaggagaatcgcttgaacccaggagacagaggctgcagtgagccaagatcacgccactgcactccagcctggcaacagagcgagactccttctcaaaataaaaaa

SEQ ID NO: 29010 - DNA, 3680 bp, Homo Sapiens
tcaaccctgcttggttttagaggattgctcccgtgggtcacttgaggcaggctccaccttccccaggaggagtggcagagtccagccagcgctcggagctggaggcccacgtgggagcagtgagcggctctgagatgccgcggcagtttcccaagctgaacatctctgaagtggatgagcaagtccggctcctggcggagaaggtgtttgctaaagtgctccgagaagaggacagcaaagatgccctgtccctgttcactgtcccagaggactgccccatcgggcaaaaggaagccaaggagagggagctgcagaaggagctggcagagcagaagtctgtggagaccgcaaaaagaaagaaaagtttcaagatgattcggtcccagtccctgtctctgcaaatgccgccacagcaagattggaagggccccccggcagccagtccggccatgtctcccacaacccctgtggtcactggagccacttccctgcccacgccagcaccctatgccatgcctgagttccagcgggtcaccatcagcggagattactgtgccgggatcactttggaggactatgagcaggcagccaagagtctggccaaggccctaatgatccgggagaagtatgcgcggctcgcctaccaccgcttcccgcggatcacatcccagtacctgggtcatccgcgggcggatactgcacctccggaagagggccttccagacttccaccctcctccactgccccaggaagacccctactgcctggatgatgcaccccccaacctggattacttggtccacatgcaggggggcatcctctttgtgtatgataacaagaagatgctggagcaccaggagccgcacagcctaccctaccccgacctggagacctacacggtggacatgagccacatcctggctctcatcaccgatggccccacgaaaacctattgtcaccggcgactgaactttctggaatccaagttcagccttcatgagatgttaaacgaaatgtccgagttcaaagagttgaagagtaacccccaccgggacttctataacgtgagaaaggtggacacacacatccatgcggccgcctgcatgaaccaaaagcatctgctgcgcttcatcaagcacacataccagacggagcctgacaggactgtggcagagaagcggggccggaagatcaccctgcggcaggtgtttgacggcctgcacatggacccctacgacctcactgtggactcactggatgtccacgcgggccggcagacattccaccgctttgacaagttcaactccaaatacaaccctgtgggggccagtgagctgcgtgacctgtatttgaaaactgaaaactatctgggaggagagtactttgctcggatggtcaaggaggttgcccgggagctggaggagagcaagtaccagtactcagagccacggctctccatctacggccgcagtcctgaggagtggcccaacctggcctactggttcatccagcacaaggtctactctcccaacatgcgctggatcatccaggtgccccggatttatgacatatttaggtcaaagaagctgctgccaaactttgggaagatgctggagaacatcttcctgccccttttcaaggccactatcaacccccaagatcatcgagagcttcacctcttccttaaatatgtgacggggtttgacagcgtggatgatgagtccaagcacagcgaccacatgttttccgacaagagcccaaacccggacgtctggaccagtgagcagaacccaccctacagctactacctgtactacatgtatgccaacatcatggtgctcaacaacctccgcagggagcgcggcctgagcacgttcctgttccggccgcactgtggggaagccggctccatcacccacctggtgtctgccttcctcactgctgacaacatttcccacgggctgctcctcaagaagagtccggtattgcagtatctctactaccttgctcagatccccattgccatgtctcctcttagcaacaacagtttgttcctcgaatattccaagaaccctctgagggaattcctacacaagggactgcatgtttctctttccaccgatgaccccatgcagttccactacacgaaggaagcacttatggaagaatatgccattgcagctcaagtgtggaagctgagcacctgcgacctgtgtgagatcgccaggaacagcgtgctgcagagcggcctctcgcatcaggaaaagcaaaagtttctgggacaaaattattataaagaaggacctgaaggaaatgatattcgaaagacaaatgtggctcagatccggatggcattccgatatgagaccttatgcaatgagctcagcttcctgtctgatgctatgaaatcagaagagatcaccgccttgaccaactaggtccagcatttgacatgcattttaactttttggttcaatttcaagtctgctgtggctaatagtggtcaagattccgaactaggactttcctctgtgaagaggatgcctctgaagaaattttaaactggtgattttggttgcactgctcactttaagagttaacatgctcacttgttagtatttctgagtaacaagatggtgacttctccttggggatctgggagctgagcacttgtctatacttgttcctaattttccaagtatttctcttgaaactgccagtgcctgaactgttggggccaggattttccctggtcagatgccaagtaacatgtggttttctgccatacttttctccattggcccaggtaggctaattggtagttgttcatttcagcctctggatggctggctggccttaaacacaatcaatttcaaagctccattttcataaaggggctactttgaaggagttaagatggaagacttccttcttgacaaattgtgtttttagtgaatttcttaaaccgttttatttagccctccttccctctttctagttggaagccaaatgtactcatgaaaacagccactcctattctgagtcttggtttcttcacctagaaagtgagggtttggactagatgagtggctttcagggtgttctgtgaatctcctcatgaatactttagggtgggggagggaagggagtgagtgatgctcaggggctgtcaaagtgactgcgttcatcagttttacactggggctgctacataatattttcatttgaacgaagaacttcaaaaagcacaggactagatgatctctgttccttttggctctaatatgctacaactgtaggccaattatcactttaccaattaagagttaggccagataagtgaaatttaacttaagggcacacagctaataagtaataggcctaaactggatttccttattccaaatcctgtcttttccccactattccattagaccccacaaatgttagttgtgtgtgtgtgtgtgtgtgtttttaatcactgtaaccgggtgcatttttttaaggcaaaatttctcccttatctactgtgatgacttcagaagatacaatggtcccaggggccaagtagaaagcatttttaaagattaatctgaattaagctttatcagtgtactctttatctgtgttactagtgcctggtatgtagtaggtgctcaataaatgcatattgaataact

SEQ ID NO: 29011 - DNA, 14327 bp, Homo Sapiens
ggccggcgagcgggcggctgcgggcggcgcggagcgggcggcgcggagcgagcgagcgagagagcggcgcgggccgggccatggggtggcgggcgccgggcgcgctgctgctggcgctgctgctgcacgggcggctgctggcggtgacccatgggctgagggcatacgatggcttgtctctgcctgaggacatagagaccgtcacagcaagccaaatgcgctggacacattcgtacctttctgatgatgagtacatgctggctgacagcatctcaggagacgacctgggcagtggggacctgggcagcggggacttccagatggtttatttccgagccctggtgaatttcactcgctccatcgagtacagccctcagctggaggatgcaggctccagagagtttcgagaggtgtccgaggctgtggtagacacgctggagtcggagtacttgaaaattcccggagaccaggttgtcagtgtggtgttcatcaaggagctggatggctgggtttttgtggagctcgatgtgggctcggaagggaatgcggatggtgctcagattcaggagatgctgctcagggtcatctccagcggctctgtggcctcctacgtcacctctccccagggattccagttccgacgcctgggcacagtgccccagttcccaagagcctgcacggaggccgagtttgcctgccacagctacaatgagtgtgtggccctggagtatcgctgtgaccggcggcccgactgcagggacatgtctgatgagctcaattgtgaggagccagtcctgggtatcagccccacattctctctccttgtggagacgacatctttaccgccccggccagagacaaccatcatgcgacagccaccagtcacccacgctcctcagcccctgcttcccggttccgtcaggcccctgccctgtgggccccaggaggccgcatgccgcaatgggcactgcatccccagagactacctctgcgacggacaggaggactgcgaggacggcagcgatgagctagactgtggccccccgccaccctgtgagcccaacgagttcccctgcgggaatggacattgtgccctcaagctgtggcgctgcgatggtgactttgactgtgaggaccgaactgatgaagccaactgccccaccaagcgtcctgaggaagtgtgcgggcccacacagttccgatgcgtctctaccaacatgtgcatcccagccagcttccactgtgacgaggagagcgactgtcctgaccggagcgacgagtttggctgcatgcccccccaggtggtgacacctccccgggagtccatccaggcttcccggggccagacagtgaccttcacctgcgtggccattggcgtccccacccccatcatcaattggaggctcaactggggccacatcccctctcatcccagggtgacagtgaccagcgagggtggccgtggcacactgatcatccgtgatgtgaaggagtcagaccagggtgcctacacctgtgaggccatgaacgcccggggcatggtgtttggcattcctgacggtgtccttgagctcgtcccacaacgaggcccctgccctgacggccacttctacctggagcacagcgccgcctgcctgccctgcttctgctttggcatcaccagcgtgtgccagagcacccgccgcttccgggaccagatcaggctgcgctttgaccaacccgatgacttcaagggtgtgaatgtgacaatgcctgcgcagcccggcacgccacccctctcctccacgcagctgcagatcgacccatccctgcacgagttccagctagtagacctgtcccgccgcttcctcgtccacgactccttctgggctctgcctgaacagttcctgggcaacaaggtggactcctatggcggctccctgcgttacaacgtgcgctacgagttggcccgtggcatgctggagccagtgcagcggccggacgtggtcctcgtgggtgccgggtaccgcctcctctcccgaggccacacacccacccaacctggtgctctgaaccagcgccaggtccagttctctgaggagcactgggtccatgagtctggccggccggtgcagcgcgcggagctgctgcaggtgctgcagagcctggaggccgtgctcatccagaccgtgtacaacaccaagatggctagcgtgggacttagcgacatcgccatggataccaccgtcacccatgccaccagccatggccgtgcccacagtgtggaggagtgcagatgccccattggctattctggcttgtcctgcgagagctgtgatgcccacttcactcgggtgcctggtgggccctacctgggcacctgctctggttgcagttgcaatggccatgccagctcctgtgaccctgtgtatggccactgcctgaattgccagcacaacacggaggggccacagtgcaacaagtgcaaggctggcttctttggggacgccatgaaggccacggccacttcctgccggccctgcccttgcccatacatcgatgcctcccgcagattctcagacacttgcttcctggacacggatggccaagccacatgtgacgcctgtgccccaggctacactggccgccgctgtgagagctgtgcccccggatacgagggcaaccccatccagcccggcgggaagtgcaggcccgtcaaccaggagattgtgcgctgtgacgagcgtggcagcatggggacctccggggaggcctgccgctgtaagaacaatgtggtggggcgcttgtgcaatgaatgtgctgacggctctttccacctgagtacccgaaaccccgatggctgcctcaagtgcttctgcatgggtgtcagtcgccactgcaccagctcttcatggagccgtgcccagttgcatggggcctctgaggagcctggtcacttcagcctgaccaacgccgcaagcacccacaccaccaacgagggcatcttctcccccacgcccggggaactgggattctcctccttccacagactcttatctggaccctacttctggagcctcccttcacgcttcctgggggacaaggtgacctcctatggaggagagctgcgcttcacagtgacccagaggtcccagccgggctccacacccctgcacgggcagccgttggtggtgctgcaaggtaacaacatcatcctagagcaccatgtggcccaggagcccagccccggccagcccagcaccttcattgtgcctttccgggagcaagcatggcagcggcccgatgggcagccagccacacgggagcacctgctgatggcactggcaggcatcgacaccctcctgatccgagcatcctacgcccagcagcccgctgagagcagggtctctggcatcagcatggacgtggctgtgcccgaggaaaccggccaggaccccgcgctggaagtggaacagtgctcctgcccacccgggtaccgtgggccgtcctgccaggactgtgacacaggctacacacgcacgcccagtggcctctacctgggtacctgtgaacgctgcagctgccatggccactcagaggcctgcgagccagaaacaggtgcctgccagggctgccagcatcacacggagggccctcggtgtgagcagtgccagccaggatactacggggacgcccagcgggggacaccacaggactgccagctgtgcccctgctacggagaccctgctgccggccaggctgcccacacttgttttctggacacagacggccaccccacctgtgatgcgtgctccccaggccacagtgggcgtcactgtgagaggtgcgcccctggctactatggcaaccccagccagggccagccatgccagagagacagccaggtgccagggcccataggctgcaactgtgacccccaaggcagcgtcagcagccagtgtgatgctgctggtcagtgccagtgcaaggcccaggtagaaggcctcacttgcagccactgccggccccaccacttccacctgagtgccagcaacccagacggctgcctgccctgcttctgtatgggcatcacccagcagtgcgccagctctgcctacacacgccacctgatctccacccactttgcccctggggacttccaaggctttgccctggtgaacccacagcgaaacagccgcctgacaggagaattcactgtggaacccgtgcccgagggtgcccagctctcttttggcaactttgcccaactcggccatgagtccttctactggcagctgccggagacataccagggagacaaggtggcggcctacggtgggaagttgcgatacaccctctcctacacagcaggcccacagggcagcccactctcggaccccgatgtgcagatcacgggcaacaacatcatgctagtggcctcccagccagcgctgcagggcccagagaggaggagctacgagatcatgttccgagaggaattctggcgccggcccgatgggcagccggccacacgcgagcacctcctgatggcactggccgacctggatgagctcctgatccgggccacgttctcctccgtgccgctggtggccagcatcagcgcagtcagcctggaggtcgcccagccggggccctcaaacagaccccgcgccctcgaggtggaggagtgccgctgcccgccaggctacatcggtctgtcctgccaggactgtgcccccggctacacgcgcaccgggagtgggctctacctcggccactgcgagctatgtgaatgcaatggccactcagacctgtgccacccagagactggggcctgctcgcaatgccagcacaacgccgcaggggagttctgcgagctttgtgcccctggctactacggagatgccacagccgggacgcctgaggactgccagccctgtgcctgcccactgaccaacccagagaacatgttttcccgcacctgtgagagcctgggagccggcgggtaccgctgcacggcctgcgaacccggctacactggccagtactgtgagcagtgtggcccaggttacgtgggtaaccccagtgtgcaagggggccagtgcctgccagagacaaaccaagccccactggtggtcgaggtccatcctgctcgaagcatagtgccccaaggtggctcccactccctgcggtgtcaggtcagtgggagcccaccccactacttctattggtcccgtgaggatgggcggcctgtgcccagcggcacccagcagcgacatcaaggctccgagctccacttccccagcgtccagccctcggatgctggggtctacatttgcacctgccgtaatctccaccaatccaataccagccgggcagagctgctggtcactgaggctccaagcaagcccatcacagtgactgtggaggagcagcggagccagagcgtgcgccccggagctgacgtcaccttcatctgcacagccaaaagcaagtccccagcctataccctggtgtggacccgcctgcacaacgggaaactgcccacccgagccatggatttcaatggcatcctgaccattcgcaacgtccagctgagtgatgcaggcacctacgtgtgcaccggctccaacatgtttgccatggaccagggcacagccactctacatgtgcaggcctcgggcaccttgtccgcccccgtggtctccatccatccgccacagctcacagtgcagcccgggcaactggcggagttccgctgcagcgccacagggagccccacgcccaccctcgagtggacagggggccccggcggccagctccctgcgaaggcacaaatccacggcggcatcctgcgcctgccagctgtcgagcccacggatcaggcccagtacttgtgccgagcccacagcagcgctgggcagcaggtggccagggctgtgctccacgtgcatgggggcggtgggcccagagtccaagtgagcccagagaggacccaggtccacgcaggccggaccgtcaggctgtactgcagggctgcaggcgtgcctagcgccaccatcacctggaggaaggaagggggcagcctcccaccacaggcccggtcagagcgcacagacatcgcgacactgctcatcccagccatcacgactgctgacgccggcttctacctctgcgtggccaccagccctgcaggcactgcccaggcccggatgcaagtggttgtcctttcagcctcagatgccagcccaccgggggtcaagattgagtcctcatcgccttctgtgacagaagggcaaacactcgacctcaactgtgtggtggcagggtcagcccatgcccaggtcacctggtacaggcgagggggtagcctgcctccccacacccaggtgcacggctcccgtctgcggctcccccaggtctcaccagctgattctggagaatatgtgtgccgtgtggagaatggatcgggccccaaggaggcctccattactgtgtctgtgctccacggcacccattctggccccagctacaccccagtgcccggcagcacccggcccatccgcatcgagccctcctcctcacacgtggcggaagggcagaccctggatctgaactgcgtggtgcccgggcaggcccacgcccaggtcacgtggcacaagcgtgggggcagcctccctgcccggcaccagacccacggctcgctgctgcggctgcaccaggtgaccccggccgactcaggcgagtatgtgtgccatgtggtgggcacctccggccccctagaggcctcagtcctggtcaccatcgaagcctctgtcatccctggacccatcccacctgtcaggatcgagtcttcatcctccacagtggccgagggccagaccctggatctgagctgcgtggtggcagggcaggcccacgcccaggtcacatggtacaagcgtgggggcagcctccctgcccggcaccaggttcgtggctcccgcctgtacatcttccaggcctcacctgccgatgcgggacagtacgtctgccgggccagcaacggcatggaggcctccatcacggtcacagtaactgggacccagggggccaacttagcctaccctgccggcagcacccagcccatccgcatcgagccctcctcctcgcaagtggcggaagggcagaccctggatctgaactgcgtggtgcccgggcagtcccatgcccaggtcacgtggcacaagcgtgggggcagcctccctgtccggcaccagacccacggctccctgctgagactctaccaagcgtcccccgccgactcgggcgagtacgtgtgccgagtgttgggcagctccgtgcctctagaggcctctgtcctggtcaccattgagcctgcgggctcagtgcctgcacttggggtcacccccacggtccggatcgagtcatcgtcttcgcaagtggccgaggggcagaccctggacctgaactgcctcgttgctggtcaggcccatgcccaggtcacgtggcacaagcgcgggggcagcctcccggcccggcaccaggtgcatggctcgaggctacgcctgctccaggtgaccccagctgattcaggggagtacgtgtgccgtgtggtcggcagctcaggtacccaggaagcctcagtccttgtcaccatccagcagcgccttagtggctcccactcccagggtgtggcgtaccccgtccgcatcgagtcctcctcagcctccctggccaatggacacaccctggacctcaactgcctggttgccagccaggctccccacaccatcacctggtataagcgtggaggcagcttacccagccggcaccagatcgtgggctcccggctgcggatccctcaggtgactccggcagactcgggcgagtacgtgtgtcacgtcagtaacggtgcaggctcccgggagacctcgctcatcgtcaccatccagggcagcggttcctcccacgtgcccagcgtctccccaccgatcaggatcgagtcgtcttcccccacggtggtggaagggcagaccttggatctgaactgcgtggtcgccaggcagccccaggctatcatcacatggtacaagcgtgggggcagccttccctcccgacaccagacccatggctcccacctgcggttgcaccaaatgtctgtggctgactcgggcgagtatgtgtgccgggccaacaacaacatcgatgccctggaggcctccatcgtcatctccgtctcccctagcgccggcagcccctccgcccctggcagctccatgcccatcagaattgagtcatcctcctcacacgtggccgaaggggagaccctggatctgaactgcgtggtccccgggcaggcccatgcccaggtcacttggcacaagcgtgggggcagcctccccagtcaccatcagacccgcggctcacggctgcggctgcaccatgtgtccccggccgactcgggtgaatacgtgtgccgggtgatgggcagctctggccccctggaggcctcagtcctggtcaccatcgaagcctctggctcaagtgctgtccacgtccccgccccaggtggagccccacccatccgcatcgagccctcctcctcccgagtggcagaagggcagaccctggatctgaagtgcgtggtgcccgggcaggcccacgcccaggtcacatggcacaagcgtggaggaaacctccctgcccggcaccaggtccacggcccactgctgaggctgaaccaggtgtccccggctgactctggcgagtactcgtgccaagtgaccggaagctcaggcaccctggaggcatctgtcctggtcacaattgagccctccagcccaggacccattcctgctccaggactggcccagcccatctacatcgaggcctcctcttcacacgtgactgaagggcagactctggatctgaactgtgtggtgcccgggcaggcccatgcccaggtcacgtggtacaagcgcgggggcagcctccccgcccggcaccagacccatggctcccagctgcggctccacctcgtctcccctgccgactcaggcgagtatgtgtgtcgtgcagccagcggcccaggccctgagcaagaagcctccttcacagtcaccgtcccgcccagtgaggggtcttcctaccgccttaggagcccggtcatctccatcgacccgcccagcagcaccgtgcagcagggccaggatgccagcttcaagtgcctcatccatgacggggcagcccccatcagcctcgagtggaagacccggaaccaggagctggaggacaacgtccacatcagtcccaatggctccatcatcaccatcgtgggcacccggcccagcaaccacggtacctaccgctgcgtggcctccaatgcctacggtgtggcccagagtgtggtgaacctcagtgtgcacgggccccctacagtgtccgtgctccccgagggccccgtgtgggtgaaagtgggaaaggctgtcaccctggagtgtgtcagtgccggggagccccgctcctctgctcgttggacccggatcagcagcacccctgccaagttggagcagcggacatatgggctcatggacagccacgcggtgctgcagatttcatcagctaaaccatcagatgcgggcacttatgtgtgccttgctcagaatgcactaggcacagcacagaagcaggtggaggtgatcgtggacacgggcgccatggccccaggggcccctcaggtccaagctgaagaagctgagctgactgtggaggctggacacacggccaccttgcgctgctcagccacaggcagccccgcgcccaccatccactggtccaagctgcgttccccactgccctggcagcaccggctggaaggtgacacactcatcataccccgggtagcccagcaggactcgggccagtacatctgcaatgccactagccctgctgggcacgctgaggccaccatcatcctgcacgtggagagcccaccatatgccaccacggtcccagagcacgcttcggtgcaggcaggggagacggtgcagctccagtgcctggctcacgggacacccccactcaccttccagtggagccgcgtgggcagcagccttcctgggagggcgaccgccaggaacgagctgctgcactttgagcgtgcagcccctgaggactcaggccgctaccgctgccgggtcaccaacaaggtgggctcagccgaggcctttgcccagctgctcgtccaaggccctcccggctctctccctgccacctccatcccagcagggtccacgcccaccgtgcaggtcacgcctcagctagagaccaagagcattggggccagcgttgagttccactgtgctgtgcccagcgaccagggtacccagctccgttggttcaaggaagggggtcagctgcctccgggtcacagcgtgcaggatggggtgctccgaatccagaacttggaccagagctgccaagggacgtatatatgccaggcccatggaccttgggggaaggcccaggccagtgcccagctggttatccaagccctgccctcggtgctcatcaacatccggacctctgtgcagaccgtggtggttggccacgccgtggagttcgaatgcctggcactgggtgaccccaagcctcaggtgacatggagcaaagttggagggcacctgcggccaggcattgtgcagagcggaggtgtcgtcaggatcgcccacgtagagctggctgatgcgggacagtatcgctgcactgccaccaacgcagctggcaccacacaatcccacgtcctgctgcttgtgcaagccttgccccagatctcaatgccccaagaagtccgtgtgcctgctggttctgcagctgtcttcccctgcatagcctcaggctaccccactcctgacatcagctggagcaagctggatggcagcctgccacctgacagccgcctggagaacaacatgctgatgctgccctcagtccgaccccaggacgcaggtacctacgtctgcaccgccactaaccgccagggcaaggtcaaagcctttgcccacctgcaggtgccagagcgggtggtgccctacttcacgcagaccccctactccttcctaccgctgcccaccatcaaggatgcctacaggaagttcgagatcaagatcaccttccggcccgactcagccgatgggatgctgctgtacaatgggcagaagcgagtcccagggagccccaccaacctggccaaccggcagcccgacttcatctccttcggcctcgtggggggaaggcccgagttccggttcgatgcaggctcaggcatggccaccatccgccatcccacaccactggccctgggccatttccacaccgtgaccctgctgcgcagcctcacccagggctccctgattgtgggtgacctggccccggtcaatgggacctcccagggcaagttccagggcctggatctgaacgaggaactctacctgggtggctatcctgactatggtgccatccccaaggcggggctgagcagcggcttcataggctgtgtccgggagctgcgcatccagggcgaggagatcgtcttccatgacctcaacctcacggcgcacggcatctcccactgccccacctgtcgggaccggccctgccagaatggcggtcagtgccatgactctgagagcagcagctacgtgtgcgtctgcccagctggcttcaccgggagccgctgtgagcactcgcaggccctgcactgccatccagaggcctgtgggcccgacgccacctgtgtgaaccggcctgacggtcgaggctacacctgccgctgccacctgggccgctcggggttgcggtgtgaggaaggtgtgacagtgaccaccccctcgctgtcgggtgctggctcctacctggcactgcccgccctcaccaacacacaccacgagctacgcctggacgtggagttcaagccactcgcccctgacggggtcctgctgttcagcggggggaagagcgggcctgtggaggacttcgtgtccctggcgatggtgggcggccacctggagttccgctatgagttggggtcagggctggccgttctgcggagcgccgagccgctggccctgggccgctggcaccgtgtgtctgcagagcgtctcaacaaggacggcagcctgcgggtgaatggtggacgccctgtgctgcgctcctcgcccggcaagagccagggcctcaacctgcacaccctgctctacctggggggtgtggagccttccgtgccactgtccccggccaccaacatgagcgctcacttccgcggctgtgtgggcgaggtgtcagtgaatggcaaacggctggacctcacctacagtttcctaggcagccagggcatcgggcaatgctatgatagctccccatgtgagcgccagccttgccaacatggtgccacgtgcatgcccgctggcgagtatgagttccagtgcctgtgtcgagatggattcaaaggagacctgtgtgagcacgaggagaacccctgccagctccgtgaaccctgtctgcatgggggcacctgccagggcacccgctgcctctgcctccctggcttctctggcccacgctgccaacaaggctctggacatggcatagcagagtccgactggcatcttgaaggcagcgggggcaatgatgcccctgggcagtacggagcctatttccacgatgatggcttcctcgccttccctggccatgtcttctccaggagcctgcccgaggtgcccgagaccatcgagctggaggttcggaccagcacagccagtggcctcctgctctggcagggtgtggaggtgggagaggccggccaaggcaaggacttcatcagcctcgggcttcaagacgggcaccttgtcttcaggtaccagctgggtagtggggaggcccgcctggtctctgaggaccccatcaatgacggcgagtggcaccgggtgacagcactgcgggagggccgcagaggttccatccaagtcgacggtgaggagctggtcagcggccggtccccaggtcccaacgtggcagtcaacgccaagggcagcgtctacatcggcggagcccctgacgtggccacgctgaccgggggcagattctcctcgggcatcacaggctgtgtcaagaacctggtgctgcactcggcccgacccggcgccccgcccccacagcccctggacctgcagcaccgcgcccaggccggggccaacacacgcccctgcccctcgtaggcacctgcctgccccacacggactcccgggccacgccccagcccgacaatgtcgagtatattattattaatattattatgaatttttgtaagaaaccgaggcgatgccacgctttgctgctaccgccctgggctggactggaggtgggcatgccaccctcacacacacagctgggcaaagccacaaggctggccagcaaggcaggttggatgggagtgggcacctcagaaagtcaccaggacttggggtcaggaacagtggctgggtgggcccagaactgcccccactgtccccctacccaccgatggagcccccagatagagctgggtggcctgtttctgcagcccttgggcagttctcactcctaggagagccaacctcggcttgtgggctggtgccccacagctacctgagacgggcatcgcaggagtctctgccacccactcaggattgggaattgtctttagtgccggctgtggagcaaaaggcagctcacccctgggcaggcggtccccatccccaccagctcgtttttcagcacccccacccacctccacccagcccctggcacctcctctggcagactccccctcctaccacgtcctcctggcctgcattcccaccccctcctgccagcacacagcctggggtccctccctcaggggctgtaagggaaggcccaccccaactcttaccaggagctgctacaggcagagcccagcactgatagggccccgcccaccgggccccgcccaccccaggccacatccccacccatctggaagtgaaggcccagggactcctccaacagacaacggacggacggatgccgctggtgctcaggaagagctagtgccttaggtgggggaaggcaggactcacgactgagagagagaggagggggatatgaccaccctgccccatctgcaggagcctgaagatccagctcaagtgccatcctgccagtggcccccagactgtggggttgggacgcctggcctctgtgtcctagaagggaccctcctgtggtctttgtcttgatttttcttaataaacggtgctatccccgcc

SEQ ID NO: 29012 - DNA, 1819 bp, Homo Sapiens
cttccctgtttatcctgaaaaggatttgaagacaagcttgaaggataaaaagccttggtgcttcccaggagccgagccgaggagcagaagaggaagagccgggggctgccgtagcctttggagatggacgagcagcccaggctgatgcattcccatgctggggtcgggatggccggacaccccggcctgtcccagcacttgcaggatggggccggagggaccgagggggagggcgggaggaagcaggacattggagacattttacagcaaattatgaccatcacagaccagagtttggatgaggcgcaggccagaaaacatgctttaaactgccacagaatgaagcctgccttgtttaatgtgttgtgtgaaatcaaagaaaaaacagttttgagtatccgaggagcccaggaggaggaacccacagacccccagctgatgcggctggacaacatgctgttagcggaaggcgtggcggggcctgagaagggcggagggtcggcggcagcggcggcagcggcggcggcttctggaggggcaggttcagacaactcagtggagcattcagattacagagccaaactctcacagatcagacaaatctaccatacggagctggagaaatacgagcaggcctgcaacgagttcaccacccacgtgatgaatctcctgcgagagcaaagccggaccaggcccatctccccaaaggagattgagcggatggtcagcatcatccaccgcaagttcagctccatccagatgcagctcaagcagagcacgtgcgaggcggtgatgatcctgcgttcccgatttctggatgcgcggcggaagagacggaatttcaacaagcaagcgacagaaatcctgaatgaatatttctattcccatctcagcaacccttaccccagtgaggaagccaaagaggagttagccaagaagtgtggcatcacagtctcccaggtatcaaactggtttggaaataagcgaatccggtacaagaagaacataggtaaatttcaagaggaagccaatatttatgctgccaaaacagctgtcactgctaccaatgtgtcagcccatggaagccaagctaactcgccctcaactcccaactcggctggttcttccagttcttttaacatgtcaaactctggagatttgttcatgagcgtgcagtcactcaatggggattcttaccaaggggcccaggttggagccaacgtgcaatcacaggtggatacccttcgccatgttatcagccagacaggaggatacagtgatggactcgcagccagtcagatgtacagtccgcagggcatcagtgctaatggaggttggcaggatgctactaccccttcatcagtgacctcccctacagaaggccctggcagtgttcactctgatacctccaactgatctcccagcaatcgcatcccggctgaccctctgccccagttggggcaggggcaggagggagggtttctctcccaagctgaagcggtcagactggaggtcgaagcaatcagcaaacacaataagagtctccttctcttctcttctttgggatgctatttcagccaatctggacacttctttatactctcttcccttttttttctgggtagaagccacccttccctgcctccagctgtcagcctggttttcgtcatcttccctgcccctgtgcctctgtcctagacttcccggggtccccgccctctctcatatcactgaaggatattttcaacaattagaggaatttaaagaggaaaaaaattacaaagaaaataataaaagtgtttgtacgttttcaaaaaaa

SEQ ID NO: 29013 - DNA, 2839 bp, Homo Sapiens
gaattccgtacggcttccggtggcgggacgcggggccgcgcacgcgggaaaagcttccccggtgtccccccatccccctccccgcgccccccccgcgtccccccagcgcgcccacctctcgcgccggggccctcgcgaggccgcagcctgaggagattcccaacctgctgagcatccgcacacccactcaggagttggggcccagctcccagtttacttggtttcccttgtgcagcctggggctctgcccaggccaccacaggcaggggtcgacatggcagagacactggagttcaacgacgtctatcaggaggtgaaaggttccatgaatgatggtcgactgaggttgagccgtcagggcatcatcttcaagaatagcaagacaggcaaagtggacaacatccaggctggggagttaacagaaggtatctggcgccgtgttgctctgggccatggacttaaactgcttacaaagaatggccatgtctacaagtatgatggcttccgagaatcggagtttgagaaactctctgatttcttcaaaactcactatcgccttgagctaatggagaaggacctttgtgtgaagggctggaactgggggacagtgaaatttggtgggcagctgctttcctttgacattggtgaccagccagtctttgagatacccctcagcaatgtgtcccagtgcaccacaggcaagaatgaggtgacactggaattccaccaaaacgatgacgcagaggtgtctctcatggaggtgcgcttctacgtcccacccacccaggaggatggtgtggaccctgttgaggcctttgcccagaatgtgttgtcaaaggcggatgtaatccaggccacgggagatgccatctgcatcttccgggagctgcagtgtctgactcctcgtggtcgttatgacattcggatctaccccacctttctgcacctgcatggcaagacctttgactacaagatcccctacaccacagtactgcgtctgtttttgttaccccacaaggaccagcgccagatgttctttgtgatcagcctggatcccccaatcaagcaaggccaaactcgctaccacttcctgatcctcctcttctccaaggacgaggacatttcgttgactctgaacatgaacgaggaagaagtggagaagcgctttgagggtcggctcaccaagaacatgtcaggatccctctatgagatggtcagccgggtcatgaaagcactggtaaaccgcaagatcacagtgccaggcaacttccaagggcactcaggggcccagtgcattacctgttcctacaaggcaagctcaggactgctctacccgctggagcggggcttcatctacgtccacaagccacctgtgcacatccgcttcgatgagatctcctttgtcaactttgctcgtggtaccactactactcgttcctttgactttgaaattgagaccaagcagggcactcagtataccttcagcagcattgagagggaggagtacgggaaactgtttgattttgtcaacgcgaaaaagctcaacatcaaaaaccgaggattgaaagagggcatgaacccaagctacgatgaatatgctgactctgatgaggaccagcatgatgcctacttggagaggatgaaggaggaaggcaagatccgggaggagaatgccaatgacagcagcgatgactcaggagaagaaaccgatgagtcattcaacccaggtgaagaggaggaagatgtggcagaggagtttgacagcaacgcctctgccagctcctccagtaatgagggtgacagtgaccgggatgagaagaagcggaaacagctcaaaaaggccaagatggccaaggaccgcaagagccgcaagaagcctgtggaggtgaagaagggcaaagaccccaatgcccccaagaggcccatgtctgcatacatgctgtggctcaatgccagccgagagaagatcaagtcagaccatcctggcatcagcatcacggatctttccaagaaggcaggcgagatctggaagggaatgtccaaagagaagaaagaggagtgggatcgcaaggctgaggatgccaggagggactatgaaaaagccatgaaagaatatgaagggggccgaggcgagtcttctaagagggacaagtcaaagaagaagaagaaagtaaaggtaaagatggaaaagaaatccacgccctctaggggctcatcatccaagtcgtcctcaaggcagctaagcgagagcttcaagagcaaagagtttgtgtctagtgatgagagctcttcgggagagaacaagagcaaaaagaagaggaggaggagcgaggactctgaagaagaagaactagccagtactccccccagctcagaggactcagcgtcaggatccgatgagtagaaacggaggaaggttctctttgcgcttgccttctcacaccccccgactccccacccatattttggtaccagtttctcctcatgaaatgcagtccctggattctgtgccatctgaacatgctctcctgttggtgtgtatgtcactagggcagtggggagacgtcttaactctgctgcttcccaaggatggctgtttataatttggggagagatagggtgggaggcagggcaatgcaggatccaaatcctcatcttactttcccgaccttaaggatgtagctgctgcttgtcctgttcaagttgctggagcaggggtcatgtgaggccaggcctgtagctcctacctggggcctatttctactttcattttgtatttctggtctgtgaaaatgatttaataaagggaactgactttggaaaccaaaaaaaggaattc

SEQ ID NO: 29014 - DNA, 1630 bp, Homo Sapiens
ccatccagtgccttccgcagcgccgctaaagcgcagttctcgttggtgtaactttttcttttttttttcagccacttccggctcctgcgtcgctccggaagcctgcgagttccggaagccttggtaatccagattcggctaggaaaagacaagctttccagagaatgtttcagagaaagttacgtggagcgtgggcgtttcgcagactcctaagtggtctggaacctaacctgcagtgtctctgagcttctggcaagtatgaggcaaggatttcacagaagaacttggagcaaaaattcccactgtcatagctataggctgtccagtcttgagggagctgcaggaacaggaaaaagagaccttcagagaagacatggcttccagaaaagagaatgcgaagagtgcaaacagagtgctaagaataagccagttggatgcacttgaactaaacaaggccctggagcagctagtttggtcccagtttactcagtgctttcatggatttaaacctgggctgttagctcgctttgagccagaggtgaaagcgtgcttatgggttttcttgtggagattcaccatctactccaaaaatgccacagtgggacagtcagttttgaatattaagtacaaaaatgatttttcccctaacctgagatatcagccacccagtaaaaatcaaaaaatctggtatgctgtttgtacaattggtggcaggtggttagaagaacgatgctatgatttgtttcgaaaccatcatttagcatcatttgggaaagtcaagcagtgtgtgaattttgtgattggacttttgaaattaggtgggctgattaattttttgattttccttcagaggggaaagtttgcaactttgacagaacgtctcctaggtattcattctgtattttgcaagcctcaaaacatacgtgaagttggctttgaatacatgaatagggaacttctctggcatggttttgctgaatttctgatttttctcttaccacttatcaatgtccagaagttgaaagccaagctgtcttcatggtgtattcctcttactggtgcacctaatagtgacaatacattagccaccagtggcaaagaatgcgctctatgtggagagtggcccaccatgcctcacaccataggatgtgagcatattttctgttatttctgtgctaagagtagtttcttatttgacgtgtactttacttgtcctaagtgtggcacagaagtacacagtctgcagccactgaaatcaggaatcgagatgtcagaagtaaatgctctttagaaactaaaattgcttcctttgaggaaaaaaatgcaccgtgtttaaattcttaatattagtcatcctaagtataccatttatgtatcctttataaggaatgtgctcctagccactgtcttctcctttccaggcatgactgaaatctaatcactggaaaccatgtgattctaaatatattatgtaaatgttaatgtattatgttttttaaatcattgcattcaatttttaatgtcaagaataatggacagcttttgtcaggtgactactaacaatgctccttcattttactacttcttaaaacaaggttggattctaaagataaagattttggagactctg

SEQ ID NO: 29015 - DNA, 1709 bp, Homo Sapiens
caatttgagtttccatttctcggatttgggaactggtataagcattgtctgtgatgtaaacaaagtcttcaatatttggagaaaacatctcctcatacttgagagcacaagaggaagagagagaccctcactgctggggagtccctgccacactcagtcccccaccacactgaatcggaattccgagagggaagaggaggcgcgagaatggaggtggaggccgtctgtggtggcgcgggcgaggtggaggcccaggactctgaccctgcccctgccttcagcaaggcccccggcagcgccggccactacgaactgccgtgggttgaaaaatataggccagtaaagctgaatgaaattgtcgggaatgaagacaccgtgagcaggctagaggtctttgcaagggaaggaaatgtgcccaacatcatcattgcgggccctccaggaaccggcaagaccacaagcattctgtgcttggcccgggccctgctgggcccagcactcaaagatgccatgttggaactcaatgcttcaaatgacaggggcattgacgttgtgaggaataaaattaaaatgtttgctcaacaaaaagtcactcttcccaaaggccgacataagatcatcattctggatgaagcagacagcatgaccgacggagcccagcaagccttgaggagaaccatggaaatctactctaaaaccactcgcttcgcccttgcttgtaatgcttcggataagatcatcgagcccattcagtcccgctgtgcagtcctccggtacacaaagctgaccgacgcccagatcctcaccaggctgatgaatgttatcgagaaggagagggtaccctacactgatgacggcctagaagccatcatcttcacggcccagggagacatgaggcaggcgctgaacaacctgcagtccaccttctcaggatttggcttcattaacagtgagaacgtgttcaaggtctgtgacgagccccacccactgctggtaaaggagatgatccagcactgtgtgaatgccaacattgacgaagcctacaagattcttgctcacttgtggcatctgggctactcaccagaagatatcattggcaacatctttcgagtgtgtaaaactttccaaatggcagaatacctgaaactggagtttatcaaggaaattggatacactcacatgaaaatagcggaaggagtgaactctcttttgcagatggcaggcctcctggcaaggctgtgtcagaagacaatggccccggtggccagttagagcagagacttcactgactgacttacaggtgccctattctgaggtacaggagccgcggctttctgatgggggaaaatgcgccttaggctgagccaacatgactgtcccccaaactccagtggctggccaggcgcggtagtcacgcctgtaatcccaacactttgggaggccgaggcaggtggatcacctgaggtcagaagttcaagaccagcctggccaacatggggaaaccctgtctttactaaaaatataaaaattagctgggtgtggtggcgggcacctgtaatcccagctactcgggaggctgtggcaggcgaaatcgcttgaacccaggaggaggaggtggaggttgcagtgagccaagatcacaccattgcactccagcctgggcgacagagactccatctggggaaaaaaattaaataaataaactcccg

SEQ ID NO: 29016 - DNA, 5859 bp, Homo Sapiens
aagcttgagttgaagacagctgagtttttgtaatttgttttgcttttgtggggaggaggcagattttgctgtgaaaagtaacagctcttttctaataatgttagcttctatatgcttgttaggcattcaagtagtcaggcaagtgtctcaaaggtttgaaattcaagggagatgtctgggttggagatataaatttgaaagtcattaatactatgggcaggtcataaagccatggactggatgaggtaggtcacctagggagaaaatgtatgtagaaaagaggacacaggcatagccaagagctctgcagcattgggaagaaaatttccaaggaaaaccaaaaaagagagatgtcacgaaagcctggagacttttttctagaaggaaggcatagttaattgtgtcagaagccattgaaagattgagtaaatggggattgagaccattcactggtctcaatggctttggcaaccactggctttggcaaaaagtgggccttgagaattccgatttcagtcaagtgctaggaataaatacccatttggagaatttgaaggagagatgaggaggtagggaccacacatacagacatgtctttacatcttttagggagttttgctgttaagggaagcagagaaattcggtgataactgaaggtagaagtggggtcaagtaaggatttttttaaaatttgagtaagatcttaataggaatgattactaaagagaataaagggaagatgtacaatcagaggtatcttaagaaggcctagtgaatgggagtcctttaagtgttttatgtgcaaagtgctatagccaatgaggcatttttaaaaaactggaaatctgggggaaagatggtcactcttgatagaaatggggctgagaagggaaatcattttagaaataatggtaaatgtattttggacatattgagttcaggaaaatatttaagcaaagattaaccaacttagtacaagggatttttatttttattatttctatgatctgaagagaaaccagagtatacaaggaattttgagcttcaagataacaagaaaaatgatatattttacaaaggaccaatccagttggtagactatttaaattatcctatatcaaattaataaggatttactttgccaagattcttggcacttttatattaacttaaattgcactggggaaaaaaaggcataatagtagttgagaagcaactaattataagcaattataagccaaattatgtttataccacaattagtgtttgaggtggtttagtaggcagattcttcagtaagaaccatcaaataattgaacagcttgtaaaacacagaaatacttcttttatctttattccaagtagagtaaccacattcttttatcattataaaataagcaacatttattatcttttgtcccaatccgcagtttgagttggatgcttataaaacatggcaagagggctgggtgcggtggcctcccagcactttggaggccgaagtgggcagctcacctgaggtcaggagttcaagacaagcctggcaaacatggtgaaacctcgtctctactaaaatacaaaaattggccgggtgtgttggcatgcacctgtaatcccagctactcgggaggctgaggcaggagaatcgcttgaacccaggaggcagaggttgcagtgagccgagatcacgccactgaactccagcctgggcaacagagcgagactccgtctcagacaaacaaaacaaagcaagagtagtttatgtacctagctcacaacatagcttctttcaacaggtttcacggagacacgtgaaccacgttcttgtaagacaagagctattctacagggtatctagagtgcaaaccgaaaccatgtctttttcagtggatttttcatgttgacatcatcttatttcactttggggaaagtttttttctaaggatgatagcgaaaagtccttttgtcttgtgacaatagcaatttttatgtcagcttgggtttttttcctcccatattcccaagtaaaagtaataactttgttaccagttttgccatctgaggttaaactgtttgaccatggcttgacgactattttatacttaacacttataaaatattagactgatagttatttaagttaccaccagtgatagctctggaatccctgttttattaatttccaggtaaatccttcttaagcacatgggaagacagcactgtaaattttggggggtaaggagaacctccatcaattaatacatcagcttgataaaattcaaagaaaaacatgatcaaataagttcagattatatttaacacattcagttctagaagtagttttgctgaataaattccaaccagttgaagctaatggagcaacggagctgccagtgcttccggaggctgctgtgctcagccaattcggaggcatggcgagccacacggtgggaggtgggtaaagccggggccctccaaggcttgggcgccacgttgcttttctcttctgaaataggaagacaatgcttctggctattgtataaaccagccgaggactgctttcattcgcacactcagccaaggcgtgagacgaattaaagcgccttctaattcgacccctggcaacgtgcgcgtcacggacaaatgtttagttttaacgcctggctgcgttcgccttgggaaaacacacttttaagaatggccaagtacctcagcagtcgcggtgaactgcacaagatcaaaaccaccacgccaagcccacgtgctggccaccgtccccgctgaaccccgccaacacccctaaggacccacccatgttttctgctaatcatttttttttctaaacagctctgcacagccgctttcctcattccgttcccggctctccccacccactctgccttcgatccgaggtttctagtccccagctggacatcacatgcaccaactcccactcaggagccggccagagcccgagccgcagcgcagtgggcagctccccgcgctctccgccaggccctcggcagccagccgccactcggccgcgagtgattgacaggcggcagcagctataggccgtggaggtgggacgatgcgtcacttcctggtcttttggggggagccgggatatataagggcggtgctcacgcagcgctctcgcttacacagtatggccggcgacattagctagcgctcgctctactctctctaacgggaaagcagcggaatacaagagactgaactgtatctgcctctatttccaaaagactcacgttcaactttcgctcacacaaagccgggaaaattttattagtcctttttttaaaaaaagttaatataaaattatagcaaaaaaaaaaaggaacctgaactttagtaacacagctggaacaatcgcagcggcggcggcagcggcgggagaagaggtttaatttagttgattttctgtggttgttggttgttcgctagtctcacggtgatggaagctgcacattttttcgaagggaccgagaagctgctggaggtttggttctcccggcagcagcccgacgcaaaccaaggatctggggatcttcgcactatcccaaggtgggtccccgggcgctcgctgacatccgggcctgggggctgtcgccgccgccatggcaccagccacgggtggagcccgagttccctcagctttcagcttgggggcaagtctgcggcctggggtgctcggcggccttggaaggtgcgcggtttgggggagagcggccatgtccacgcgggccggagccggcttctcccgccgtggttgccgcgcctggcattgccctgggggaggggaggaggccggcgcggccgcgtgctcaggtaacgtcccgcgctgggcggcgggcggcgccgcccggggtggttttgcggcccgcgcctcccgacatttccctccgtagtagttggcggcaggggccaggtgggggtcgggggcgcctgccgggttgcctccggcaggtgtggctcggcgggcttagtcaggcgctaattcgggcgtgcccggcttcggggaatggagggcgggagcggcgcttgttcttgcctcgggcgcggataggaggggcccctctttcttatagaactaggactaccaggatccagggacagcaccacccacagtgggctaggcccttccctatcaagtcactaattaagaaaatgccctataggcttgcctatagcctgatcttatggaggtcattttctcaattgagggtcccctcctctcagataactctagtttgtgtgtcaagttgacataatatgagccactagtgatggctgcctttaatccaacagaggtaggggtaggtaaaggtcaaggctaaactactctacatagtgacttctgctgccgattctgagatacacaaggtggagaccctgaaagtcgaacatttatatagtatattttcaactatgagcatgaaacatgatagcgacacaaggcaacaactaacaaagagcatggggtgggtttagcacgaaggatagctgccaaaggagtagtacatgtttcgccttgtaagcatgaggacctgagttcaatgctcacaacacatttctttataaagagccagaggttttgtgtgtacttgtaatgccagaactgtggagatggagacaggaatatctctggggcttgctagccatccagaccaagttccaggctaatgagagacccggtctccaaagagagggtagatgggtgtctgtatagtcaggataagaataaccattgcagagtgctggggactggatgctgggttgtcctctggactccacacacacatacacatatgcacacatatacacagacagttacacatgcacatatgatcatgtacacacacacacacacacacacacacacacacacacacaacaagacaacaaaatgattccacttggcatgggggtgctaaattattgttctgagtgtctagttcataggcagtctatgaacagagccgtcaaccctgtcttttacctatctaagttttatatatatttgctcctcgttgatgcctgacctatttctgcgtatatgaacatgcaaatattcgctcatcatgtacatagaaatgaaatcaaggaaacctttttttgacctagaataaggctaaatgtcaaaaacaaagctgcaaacaaacatcagtgcacccaagagggacatgccaactccccctatagaatgcagccttgcagggccccagagagcagccaccaggcttcctagagagactcttccaaccacgttgtctgtgactcccccacacagtgagtgaaggagaaggaagagggaacaattagacctctgaggtcaccactgctgcaggacagctcacatctagacattattgcagtcacagcaacagtgatgggcaccgtcagcgctctctccctgttcactgggtgagaaaagatttttcatttcatacatcatttacaacttgctgctgtgattctaaaaaaccagtgggctttatcgagttaatgagcaagaaaaacatatttggtgagcgtgttaatttcacaaaagttctgcagagcccaggacattaggcaatgtgcacggggcatatgggcactgcagggagtccactccccagacaccctccacccagatatgtgggcacctggctatttactaataagtcacaaatacatctaaattgaaactgaatagatagcaaatgtgtccttgcgattcatgttctctgtattgtctctggcagggacatctgggaccttgggctaaagtaaccatggatccagttgagtttccttccacatgcaaatctttatagcaagaagaaaaagctt

SEQ ID NO: 29017 - DNA, 4353 bp, Homo Sapiens
tcagcctgaacatggatgaagttttttgtttttaagagcttccttagtgattgttataggagcctcctagacaagtctcagctcccagctccccgctcccggctcccggcgcccggcgcccggcgcggagctgttcctcaaacgacacgcagccgaggtgggtgggtgtggggacgcgggagccagtgtcgtcggatcggcccgcagtccgctgtcctgctgagcccggaggccgcctggatggagccgccgctcccggtcggagcccagccgcttgccactgtcgagggtatggagatgaagggtcctctccgggagccctgcgccctgaccctagcccagaggaacgggcaatatgagttaataatccagttgcatgagaaggaacagcatgttcaagatatcattcctataaatagccacttcagatgtgttcaagaagcagaagaaactcttttgattgacatagcttctaacagtggctgcaaaattcgggttcagggggactggatcagagagcgccgctttgaaatccctgatgaggaacactgtttgaagttcctctcagctgtccttgctgctcagaaagctcagtcacagcttcttgttccagagcaaaaggactcatctagctggtaccagaaattagacactaaggacaaaccttctgttttttcagggcttcttggatttgaagacaatttttcttctatgaatttggacaagaaaataaattcacaaaatcagcctactgggattcatcgggaacccccacctccacccttttcagtgaataaaatgcttccacgtgaaaaagaagcttctaacaaggagcagcccaaagtgaccaacaccatgcggaagctctttgtaccaaatacccaatctgggcagcgggagggtctcatcaaacatatcctggcaaagcgagagaaagaatatgtcaacattcagactttcagattttttgttggaacttggaatgtgaatggccagtctccagatagcgggttagaaccttggctgaactgtgatcccaatcctcctgatatctactgcattggattccaagaactggacttgagcacagaagccttcttctactttgaatctgtgaaggaacaagaatggtccatggctgtagagagaggtttgcattccaaagccaagtataagaaagttcaactggtgcgccttgttgggatgatgcttcttatatttgccagaaaggatcagtgtcgatacattcgtgatattgctacagaaacagttggaactggaatcatggggaaaatgggaaacaaaggtggggtagctgtgagatttgtatttcacaacaccaccttttgcattgtcaattcccatctggctgcacacgtggaggactttgagagaaggaatcaagattataaggacatttgtgcgagaatgagttttgtggtcccaaatcagaccctcccgcagttgaacatcatgaaacatgaggttgtcatttggttgggagatttgaattatagactttgcatgcctgatgccaatgaggtgaaaagtcttattaataagaaagaccttcagagactcttgaaattcgaccagctaaatattcagcgcacacagaaaaaagcttttgttgacttcaatgaaggggaaatcaagttcatccccacttataagtatgactctaaaacagaccggtgggattccagtgggaaatgccgggttccagcctggtgtgaccgaattctttggagaggaacaaatgttaatcagcttaattatcggagtcacatggaactgaaaaccagcgaccacaagcctgttagcgccctcttccatattggggtgaaggttgtggatgaacgaaggtaccggaaagtctttgaagatagtgtacgcatcatggacagaatggaaaatgacttccttccttccttagaactcagcaggagggagtttgtgtttgaaaatgtgaagtttcggcaactacaaaaggagaagttccagatcagcaacaatggacaggttccctgccatttttctttcatccctaaacttaatgacagccagtactgcaagccatggcttcgggctgaaccttttgagggctacttggagccaaatgagacagtggacatttctcttgatgtgtatgtcagcaaagactctgtaaccatcctgaactcgggagaagataagattgaagatattctcgtccttcacctggatcgaggcaaagattacttcttgactatcagtggaaattacctcccaagttgttttggcacatccttagaggctctgtgccgtatgaaaagaccaatccgagaagttcctgttaccaaactcatagacttggagaaatcccttctgcaaatggttcctttggatgaaggtgccagtgagagaccccttcaggttcccaaggagatctggcttctagtagatcacctattcaaatacgcctgtcaccaggaggacctgttccagacccctggaatgcaggaagagctccagcagatcattgattgtctggataccagcattcctgagacaatccctggcagcaaccactctgtggctgaagcactgctcattttcttggaagccctgccagagccagtcatctgttacgagctgtatcagcgatgtcttgactctgcttatgatccccggatctgccgacaggtgatctcccagcttccgagatgccatagaaatgttttccgttacttgatggcattccttcgagaactcttaaaattctctgaatacaatagcgtcaatgccaacatgatcgctactctcttcactagtcttctcctgaggcctccacccaaccttatggcaagacagactccaagtgaccgccagcgtgctattcagttccttctgggctttctgcttgggagcgaagaagactaaggcttttactgttctctgatattctagaagcagacgatctcgggctccaagtatttcagaatgatttaaaaagtcatgccacaggaagggtctattgcagaatttcaagttctgtttatagtaaaaaggaagagcgtttcctaatccctcctttaccatatcctacacagaaaaatacttttagacttatattgccaagccaaagttaccatattttggtgtttttgtgttttctctttataaggcaaaaagatctgtatttacactccttcacctaaggatgtgtttgttgccctcctacccaattgtcatgattgtccttagtaccctaggcctagattctgagatcttcccattctaggcctacaagcactacttgctgtagctgagacttgtctagagtcctttgttttgcacttttgacccaccccttcctggatcactcctttgcactccactcccggaattcctgtcactttgaacgaagtctgagtgaggctagtgactccttgggtgtcctcaacagtgaattcactgtctgcgtgcagttattacatgcatttgtgcattctactacaatggcatctttatgtctctgtaacattggccttttcatggctccacactgggtggaaggatattctcttagatcacatttagtagcataactgtagggactattagagatggcatctcatcgatgagagagaatcacaatcagaatggaagcactttgagtatctgaagagtgagagcattcatgtttgacaggtcctgcttcccactatccttttcctgttattattcaaattttacacaaggactaatcctgggtgtctctgagacccatctcctgcctagacatccacctccagagcaacactggccccacagtaaaagaggaagtcttgtacctcaggcaggcccatctagagctattgctccttcccacagcaaaggtattgtggatgacccttagaatccattctctggtcttctgaaataccaagggcagatgtcacctccttcctcagcaggactgactctgggctctacaaccagctccttcacataaagggtttagagactccccttggctcccagtcaccatatccagtgttgtgtaaagagactggccaacaggaccaaccaagcaccttacctctcccatacaagatgaccctctgagcttttcatttattcaagctctgtggtacagcctttttttaaaataaattaatctatattggttgacaaacaagccaccaaccactgactgcaaaactgcctgatgcagttgggttcctcctggttttcttttgttacaaccacccttgcctgtttacattaattgcaaggagcataacgtacaggctgtatgtacaatcctgggcattgactctgtgacatttctagcatatccaaggcacc

SEQ ID NO: 29018 - DNA, 3634 bp, Homo Sapiens
caagactggaagcagagagagagagcaagagtgagagagagcgagcgagcgtagtcaggagatggtgttgtattccaggagaaaaacgtttcttcatttcaactcaaacttgctgctaaagcgcctaaatctgaaaaggaaatggacccagaatatgaagagaaaatgaaagccgaccgagcaaagagatttgaatttttactgaagcagacagaactttttgcacatttcattcagccttcagcacagaaatctccaacatctccactgaacatgaaattgggacgtccccgaataaagaaagatgaaaagcagagcttaatttctgctggagactaccgccataggcgcacagagcaagaagaagatgaagagctactgtctgagagtcggaaaacatctaatgtgtgtattagatttgaggtgtcaccttcatatgtgaaaggggggccactgagagattatcagattcgaggactgaattggttgatctctttatatgaaaatggagtcaatggcattttggctgatgaaatgggccttgggaaaactttacaaacaattgctttgcttggttacctgaaacactaccgaaatattcctggacctcacatggttttagttccaaagtctactttacacaactggatgaatgaatttaaacgatgggtcccatctctccgtgtcatttgttttgtcggagacaaggatgccagagctgcttttattcgtgatgaaatgatgccaggagagtgggatgtttgcgttacttcttatgagatggtaattaaagaaaaatctgtattcaaaaagtttcactggcgatacctggtcattgatgaagctcacagaataaagaatgaaaaatctaagctttcagagattgttcgtgagttcaagtcgactaaccgcttgctcctaactggaacacctttgcagaataacctgcatgaactgtgggccttactcaactttttattgcctgatgtctttaattctgcagatgactttgattcttggtttgacactaaaaattgtcttggtgatcaaaaactcgtggaaagacttcatgcagttttaaaaccatttttgttacgccgtataaaaactgatgtagagaagagtctgccacctaaaaaggaaataaagatttacttggggctgagtaagatgcaacgagaatggtatacaaaaatcctgatgaaagatattgatgttttaaactcttctggcaagatggacaagatgcgactcttaaacattctgatgcagcttcgaaagtgttgtaatcatccatatctgtttgatggtgctgaacctggtccaccttataccactgatgagcatattgtcagcaacagtggtaaaatggtagttctggataaactattggccaaactcaaagaacagggttcaagggttctcattttcagccagatgactcgcttgctggatattttggaagattattgcatgtggcgtggttatgagtattgtcgactggatggacaaaccccgcatgaagaaagagaggataaattcctagaagtggaatttctgggtcaaagggaagcaatagaggcttttaatgctcctaatagtagcaaattcatctttatgctaagtaccagggctggaggtctcggaattaacctggcaagtgctgatgtggttatactatatgattcagactggaacccacaggttgatctacaagctatggatcgagcacatcgtattggtcagaagaaaccagtacgtgtattccgtctcatcactgacaacactgttgaagagaggattgtagaaagagctgagataaaactgagactcgattcaattgttatacaacaaggaagactcattgaccaacggtctaacaagctggcaaaagaggaaatgttacaaatgatacggcatggagccacccatgtttttgcttctaaagagagtgagttgacagatgaagacattacaactattctggaaagaggggaaaagaagactgcagagatgaatgaacgcctgcaaaaaatgggagagtcttctctaagaaattttagaatggacattgaacaaagtttatacaaatttgagggagaagattatagagaaaaacagaagcttggcatggtggaatggattgaacctcctaaacgagaacgcaaagcaaactacgcagtggatgcctactttagagaggctttgcgtgtcagcgagccaaagattccaaaggctccacggcctccaaaacagccaaatgttcaggattttcaatttttcccaccacgcttatttgagctcctggaaaaggaaattctttattatcggaagacaataggctataaggttccaaggaatcctgatatcccaaatccagctctggctcaaagagaagagcaaaaaaagattgatggagctgaacctcttacaccagaagagactgaagaaaaggaaaaacttctcacacaaggtttcacaaactggactaaacgagattttaaccagtttattaaagctaatgagaaatatggaagagatgacattgataacatagctcgagaggtagagggcaaatcccctgaggaggtcatggagtattcagctgtattttgggaacgttgcaatgaattacaggacattgagaaaattatggctcaaattgaacgtggagaagcaagaattcaacgaaggatcagtatcaagaaagccctggatgccaaaattgcaagatacaaggctccatttcatcagttgcgcattcagtatggaaccagcaaaggaaagaactatactgaggaagaagatagattcttgatttgtatgttacacaaaatgggctttgatagagaaaatgtatatgaagaattaagacagtgtgtacgaaatgctccccagtttagatttgactggtttatcaagtctaggactgccatggaattccagagacgctgtaacactctgatttcattgattgagaaagaaaatatggaaattgaggaaagagagagagcagaaaagaagaaacgggcaactaaaactccaatggtaaaattttcagcattttcctaacttttagatttaacattgttgggccatttaaaatgtgcatattggagcagaacattaaatctgtttccattttagtcacagaaaagaaaagcagagtcagctactgagagctctggaaagaaggatgtcaagaaggtgaaatcctaaagcctagaaataaagttttaaatgggaaactgctattttcttgttcccatcttcaaatgctaattgccagttccagtgtattcatggtactctaagaaaaatctctttggttttgatttcttgcatattttatatattttacaatgctttctacctgaaatgtgtagctttatattttatggcattctagtatttttgtgtactgtattttgtgcatttcatgtcttcatcaaaatcctctcagtccttgttcttttgaagcttgtgctgaggttttagcttttctatgttttatatgccgctgctttgaaagagaacctagattctatagttgtattattgttgtttcatactttaaatttatatggctgtggaaaaacgaattaaaatgttttgaggagaaagaaaaaaaaaa

SEQ ID NO: 29019 - DNA, 2730 bp, Homo Sapiens
aaaattcactatgatcaagtgggattcatcctaggaatgtaagactggttccacatatgcaaattaataagcattatagatcacattagcagaaccaagaacaaagaccatatgatcttttcaatagacattgaaaaagtgtttgataaaattcaatattcctttattttaaaaaccctcaaaaactcagtatacatggagtataataataataaaggccataaatttacagcaaacttcatactgaatggagaaaaattgaaagcctttcccctaaaatctggaaaaaaccaagaatgctcactttcaccatttttatgcaacataatctgctccatctagctctttccagtgcagccactgccgccgcccaggagccctcgtcccctgccttgtccccctactcgttcccgctcccacggcatggagcaggacactgccgcagtggcagccaccgtggcagccgcggatgcgaccgccactatcgtggtcatagaggacgagcagcccgggccgtccacctctcaggaggagggagcggccgccgcggccaccgaagccaccgcggccacggagaagggcgagaagaagaaggagaaaaacgtttcttcatttcaactcaaacttgctgctaaagcgcctaaatctgaaaaggaaatggacccagaatatgaagagaaaatgaaagccgaccgagcaaagagatttgaatttttactgaagcagacagaactttttgcacatttcattcagccttcagcacagaaatctccaacatctccactgaacatgaaattgggacgtccccgaataaagaaagatgaaaagcagagcttaatttctgctggagactaccgccataggcgcacagagcaagaagaagatgaagagctactgtctgagagtcggaaaacatctaatgtgtgtattagatttgaggtgtcaccttcatatgtgaaaggggggccactgagagattatcagattcgaggactgaattggttgatctctttatatgaaaatggagtcaatggcattttggctgatgaaatgggccttgggaaaactttacaaacaattgctttgcttggttacctgaaacactaccgaaatattcctggacctcacatggttttagttccaaagtctactttacacaactggatgaatgaatttaaacgatgggtcccatctctccgtgtcatttgttttgtcggagacaaggatgccagagctgcttttattcgtgatgaaatgatgccaggagagtgggatgtttgcgttacttcttatgagatggtaattaaagaaaaatctgtattcaaaaagtttcactggcgatacctggtcattgatgaagctcacagaataaagaatgaaaaatctaagctttcagagattgttcgtgagttcaagtcgactaaccgcttgctcctaactggaacacctttgcagaataacctgcatgaactgtgggccttactcaactttttattgcctgatgtctttaattctgcagatgactttgattcttggtttgacactaaaaattgtcttggtgatcaaaaactcgtggaaagacttcatgcagttttaaaaccatttttgttacgccgtataaaaactgatgtagagaagagtctgccacctaaaaaggaaataaagatttacttggggctgagtaagatgcaacgagaatggtatacaaaaatcctgatgaaagatattgatgttttaaactcttctggcaagatggacaagatgcgactcttaaacattctgatgcagcttcgaaagtgttgtaatcatccatatctgtttgatggtgctgaacctggtccaccttataccactgatgagcatattgtcagcaacagtggtaaaatggtagttctggataaactattggccaaactcaaagaacagggttcaagggttctcattttcagccagatgactcgcttgctggatattttggaagattattgcatgtggcgtggttatgagtattgtcgactggatggacaaaccccgcatgaagaaagagaggataaattcctagaagtggaatttctgggtcaaagggaagcaatagaggcttttaatgctcctaatagtagcaaattcatctttatgctaagtaccagggctggaggtctcggaattaacctggcaagtgctgatgtggttatactatatgattcagactggaacccacaggttgatctacaagctatggatcgagcacatcgtattggtcagaagaaaccagtacgtgtattccgtctcatcactgacaacactgttgaagagaggattgtagaaagagctgagataaaactgagactcgattcaattgttatacaacaaggaagactcattgaccaacagtctaacaagctggcaaaagaggaaatgttacaaatgatacggcatggagccacccatgtttttgcttctaaagagagtgagttgacagatgaagacattacaactattctggaaagaggggaaaagaagactgcagagatgaatgaacgcctgcaaaaaatgggagagtcttctctaagaaattttagaatggacattgaacaaagtttatacaaatttgagggagaagattatagagaaaaacagaagcttggcatggtggaatggattgaacctcctaaacgagaacgcaaagcaaactacgcagtggatgcctactttagagaggctttgcgtgtc

SEQ ID NO: 29020 - DNA, 1911 bp, Homo Sapiens
gaattcccgccgggcttggccatggagctgctgtgccacgaggtggacccggtccgcagggccgtgcgggaccgcaacctgctccgagacgaccgcgtcctgcagaacctgctcaccatcgaggagcgctaccttccgcagtgctcctacttcaagtgcgtgcagaaggacatccaaccctacatgcgcagaatggtggccacctggatgctggaggtctgtgaggaacagaagtgcgaagaagaggtcttccctctggccatgaattacctggaccgtttcttggctggggtcccgactccgaagtcccatctgcaactcctgggtgctgtctgcatgttcctggcctccaaactcaaagagaccagcccgctgaccgcggagaagctgtgcatttacaccgacaactccatcaagcctcaggagctgctggagtgggaactggtggtgctggggaagttgaagtggaacctggcagctgtcactcctcatgacttcattgagcacatcttgcgcaagctgccccagcagcgggagaagctgtctctgatccgcaagcatgctcagaccttcattgctctgtgtgccaccgactttaagtttgccatgtacccaccgtcgatgatcgcaactggaagtgtgggagcagccatctgtgggctccagcaggatgaggaagtgagctcgctcacttgtgatgccctgactgagctgctggctaagatcaccaacacagacgtggattgtctcaaagcttgccaggagcagattgaggcggtgctcctcaatagcctgcagcagtaccgtcaggaccaacgtgacggatccaagtcggaggatgaactggaccaagccagcacccctacagacgtgcgggatatcgacctgtgaggatgccagttgggccgaaagagagagacgcgtccataatctggtctcttcttctttctggttgtttttgttctttgtgttttagggtgaaacttaaaaaaaaaattctgcccccacctagatcatatttaaagatcttttagaagtgagagaaaaaggtcctacgaaaacggaataataaaaagcatttggtgcctatttgaagtacagcataagggaatcccttgtatatgcgaacagttattgtttgattatgtaaaagtaatagtaaaatgcttacagggaaacctgcagagtagttagagaatatgtatgcctgcaatatgggaccaaattagaggagacttttttttttcatgttatgagctagcacatacacccccttgtagtataatttcaaggaactgtgtacgccatttatcgatgattagattgcaaagcaatgaactcaagaaggaattgaaataaggagggacatgatggggaaggagtacaaaacaatctctcaacatgattgaaccatttgggatggagaagcacctttgctctcagccacctgttactaagtcaggagtgtagttggatctctacattaatgtcctcttgctgtctacagtagctgctacctaaaaaaagatgttttattttgccagttggacacaggtgattggctcctgggtttcatgttctgtgacatcctgcttcttcttccaaatgcagttcattgcagacaccaccatattgctatctaatggggaaatgtagctatgggccataaccaaaactcacatgaaacggaggcagatggagaccaagggtgggatccagaatggagtcttttctgttattgtatttaaaagggtaatgtggccttggcatttcttcttagaaaaaaactaatttttggtgctgattggcatgtctggttcacagtttagcattgttataaaccattccattcgaaaagcactttgaaaaattgttcccgagcgatagatgggatggtttatgcaggaattc

SEQ ID NO: 29021 - DNA, 4180 bp, Homo Sapiens
ccagggtgatgctgaagatgatgaccttcttccaaggcctctagagccatcagcctgtgccaggcaccctcgacttgcctagaggcccccaaaagttgcagtccacatcagaggcagagtcagaggcctccatgtcggaggcctcctctgaggacctggtgccacccctggaggctggggcagccccatatagggaggaggaagaggcggcgaagaagaagaaggagaagaagaagaagtccaaaggcctggccaatgtgttctgcgtcttcaccaaagggaagaagaagaagggtcagcccagctcagcggagcccgaggacgcagccgggtccaggcaggggctggatggcccgccccccacagtggaggagctgaaggcggcgctggagcgcgggcagctggaggcggcgcggccgctgctggcgctggagcgggagctggcggcggcggcggcggcgggcggtgtgagcgaggaggagctggtgcggcgccagagcaaggtggaggcgctgtacgagctgctgcgcgaccaggtgctgggcgtgctgcggcggccgctggaggcgccgcccgagcggctgcgccaggcgctggccgtggtggcggagcaggagcgcgaggaccgccaggcggcggcggcggggccggggacctcggggctggcggccacgcgcccgcggcgctggctgcagctgtggcggcgcggcgtggcggaggcggccgaggagcgcatgggccagcggccggccgcgggcgccgaggtccccgagagcgtctttctgcacttgggccgcaccatgaaggaggacctggaggccgtggtggagcggctgaagccgctgttccccgccgagttcggcgtcgtggcggcctacgccgagagctaccaccagcacttcgcggcccacctggccgccgtggcgcagttcgagctgtgcgagcgcgacacctacatgctgctgctctgggtggagaacctctaccccaatgacatcatcaacagccccaagctggtgggtgagctgcagggtatggggctcgggagcctcctgccccccaggcagatccgactgctggaggccacattcctgtccagtgaggcggccaatgtgagggagttgatggaccgagctctggagctagaggcacggcgctgggctgaggatgtgcctccccagaggctggacggccactgccacagcgagctggccatcgacatcatccagatcacctcccaggcccaggccaaggccgagagcatcacgctggacttgggctcacagataaagcgggtgctgctggtggagctgcctgcgttcctgaggagctaccagcgcgcctttaatgaatttctggagagaggcaagcagctgacgaattacagggccaatgttattgccaacatcaacaactgcctgtccttccggatgtccatggagcagaattggcaggtaccccaggacaccctgagcctcctgctgggccccctgggtgagctcaagagccacggctttgacaccctgctccagaacctgcatgaggacctgaagccactgttcaagaggttcacgcacacccgctgggcggcccctgtggagaccctggaaaacatcatcgccactgtagacacgaggctgcctgagttctcagagctgcagggctgtttccgggaggagctcatggaggccttgcacctgcacctggtgaaggagtacatcatccaactcagcaaggggcgcctggtcctcaagacggccgagcagcagcagcagctggctgggtacatcctggccaatgctgacaccatccagcacttctgcacccagcacggctccccggcgacctggctgcagcctgctctccctacgctggccgagatcattcgcctgcaggaccccagtgccatcaagattgaggtggccacttatgccacctgctaccctgacttcagcaaaggccacctgagcgctatcctggccatcaaggggaacctatccaacagtgaggtcaagcgcatccggagcatcttggacgtcagcatgggggcgcaggagccctcccggcccctattttcccttataaaggttggttagcttttcctgtggcctgacctgcctgtgagtgcccagcaagccttgggcacaccccgctgggagctgttaagagcagcgctggttctcggttcctcccgggtctcctgtgctctgatgctacttctgcctagccctggcggaggtgcaggccctgtcagctggaactggacagaccttggtttgtttacatgtccgatgggggcaggagctcccatcctgggcagccaaccaggcaacaccaaggactctttgtaaacgatagctgatcgtgtgcacgcaaggaaagaaccaggagggagagtgcagccaggctcagggatccccggacacctctgtccagagcccctccacagtcggcctcatgactgtcctcctcgtgggtggggccgagggccctcttcagctctctggagacaggggccgagcctcacccatctgccctctgcagcccagggccgccgtgagcgggattcagcaatggtggaatggaagacagaactggaagagaaagaaggaaaagatgagctctcgtctggcaggggcttttagggtcctgtggcgagctgtgagcaccgccagcgttagacgtcacatccaggtggccccacggcccctacaggctggccctgcaatggggccctgagccctccctcttcatcccccaaggcctcaactagagggtggtcccccgagggcttggtgtctactaccgaagggcccaagacctcctgggtcctctcaggctcccccttccccaaggcagggacaggccctgggggtgccaccgtgggccctgccacccagaagtctggctgaggtctgggcaggggcagggcaagcttgacctctcactgttgaccctttggcctctgtatttgtttcctattgccgtgacaggtttccacaaacttcgtggatcaaaacgaggtcttccagttctgcgggtcagaaggctgacctggggctcaaatctgggtgtcggcagtcctgcactccttctggaggctctaggggagaattcatttctggccttttcatttttagaggctgaccgtaattcttgacttcaggctcctccatcttcagagccagctgtgggtagttgaatctttttcccgtcacctcattgaggcctcccctctcctgcctccctccaccacttttttttttttttttttgagacagggtcttgctgtgttgcccaggctggagtgcagtggcctggtcatggcatcaaggctcactgcagcctggacctcctggttcaagtgatcctcttgtctcagtcccctgagacaatcccccacgcccagctacatatttttgtggatacagggtctcattctgttgcctaggcttgtctggaactcctgggctcaagggatcttgtagccttagcctcctaaagtgctgggattataggcatgagtcactcgtacccggcctgctctaccgcttttaaggacgcttatgatcacattgcgcctacccagagaacccaggtcgtctttctattttcaggtcagctgattagccaccttagttccatctgcaactttagttcccactggctgtgtaacctaacatagtcacaggctctggggactgtcacgtggacatctttgggaggccgttattctgcccaccgcaccctccgttcatcccctgccctgccgggcacctcgctctaccccaggaaaatgtgagctcgttttcctgctcggcatgtgctccccctaaggctctgctcctccctgggcctgaaagttccttctcagcctgagagggggcccttcgatctcaggcatgactcagcccggctgatgcctctgcagtgctgagtcaggatttggggccggctctcttgggtctgtccccttttcccaggtactgccttacaaagctgtggccaggaagtggccggtataaaggatgcccaaggtctttgtacgtgtgtaggagttagcgtgtttgatattgttaatataataataattattttttagagtactgcttttgtatgtatgttgaacaggatccaggtttttatagcttgatataaaacagaattcaaaagtgaaaaa

SEQ ID NO: 29022 - DNA, 5387 bp, Homo Sapiens
gggacccgtgaccgtcacggagagatagagaacccctagcggacctgaggaacctgggctctgcttcctccgcctgctgcctggactgctcagtgaggtggggggatccccggccaccggtgctgtggctgtagctgacctctttggaccgggatgtgggtatcctgggctcctggcctgtggctgctcggtctttgggctaccttcggccatggggcaaatacaggtgcacaatgcccaccttcacagcaggaaggactcaaattggaacacagtagtagcctgccagccaacgtgactggcttcaacctcatccaccgactcagcctcatgaagaagtctgccatcaagaagatccgcaaccccaaggggcctctcatcctgcgcctgggggcggcccccgtgacccagcccacgcgacgagtattccctcggggtctcccggaggagtttgccctggtgctgacactactgctgaagaaacacacccaccagaagacgtggtatctgtttcaagtgaccgatgcaaatgggtatccacagatatccctggaagtcaacagccaagagcggagcctggagctcagggcccagggccaggatggcgactttgtgtcctgcatcttcccagtgccccagctcttcgacttgcgttggcacaagctgatgctgagtgtggctggacgtgtggcctctgtgcacgtggactgcagctcagcctcctcccagcctctggggccccgacgacccatgaggcctgtgggccatgtatttctaggcttggatgctgagcagggcaagcctgtctcgtttgaccttcagcaggtgcacatctactgtgacccggagctcgtgctggaggagggctgctgtgagattttaccagcagggtgccccccagagacctccaaggcccgccgggacacccagagcaatgagctcattgagatcaatccacagtctgaaggcaaggtctacacccgctgcttctgcctggaggagcctcaaaacagcgaggtggatgcccagctgacgggaagaatcagccagaaggcagaaaggggagcaaaggtccatcaggagacagcagccgatgagtgtccgccctgtgtccatggtgcccgggacagcaatgtcacacttgctccctctggccccaagggagggaaaggtgagcggggcctgcctggtccaccaggctccaagggagagaagggagcacggggcaatgactgtgttcgaatctccccggatgccccgcttcagtgtgcagaaggcccgaagggagagaagggggagtcaggagctctgggaccctcaggactcccaggctcaacaggcgagaagggccagaaaggcgagaagggcgacggaggcatcaagggcgtgccgggaaagccaggccgggacgcgccaggagagatctgtgtcattgggcccaaagggcagaagggagaccctggctttgttgggcctgaggggctggcaggagagcctgggccccccggcctccctggaccccctgggataggactgcctgggaccccgggggatccaggtggcccaccaggccccaagggagacaagggcagctcggggatcccaggaaaggaaggccctggtgggaaacctgggaagccaggtgtgaagggagagaagggtgacccctgtgaagtgtgcccaacactgcctgaagggttccagaactttgttggacttcctggaaagccagggcccaaaggggagcctggtgatcctgtacgagccaggggagaccctggcatccaaggcatcaaaggagagaagggggagccctgcttgtcctgcagctcggttgtaggggcccagcatcttgtgtcctccacaggggccagtggagatgtgggttcccctggctttggtctgcctggccttccgggtagagctggggttccagggctgaaaggagagaagggtaacttcggggaggcagggccagctggcagtccagggccaccaggaccagtggggccagcaggcatcaaaggggcgaagggggagccctgtgagccgtgcccagccctgtccaaccttcaggatggggatgtccgtgtggtggccttgcctggcccatccggagagaagggggaacctgggcctccaggctttggcttgccaggaaaacagggcaaggctggagagcgtggactgaaggggcagaagggtgatgctgggaatcctggagaccctggaacgccgggcaccacagggcggccaggactgtcaggagagcctggagttcagggccccgcggggccaaaaggagaaaagggtgatggctgcactgcctgccccagcctgcaggggacagtgacagacatggcaggacggcctgggcagcccgggcccaaaggagagcagggccccgaaggcgtgggccgacctggtaaacccggccaacccggtctaccaggagttcaagggcccccaggactgaagggcgtgcagggagagccagggcctccaggaaggggagtccagggaccccagggggagcctggagccccgggtttgcctggcattcagggacttccgggacctcggggaccacctggccccactggagagaagggtgcccagggatctccaggggtgaaaggagccaccggacccgtgggacctcctggggccagtgtctctgggcctccgggccgtgatgggcagcaaggacagacgggactcagaggaacaccaggtgaaaaaggaccacgaggagagaagggtgagccaggggagtgctcctgcccctctcaaggagacctcatcttctctggcatgccgggtgctccgggactttggatgggcagctcctggcagccgggcccgcagggtccaccaggtattcccggaccaccaggcccccctggagtacctgggctgcagggagtgcctggaaacaacggtttgccaggacagcctgggctcactgcagaactgggatccttaccaattgaacagcacctccttaagagtatctgcggggactgtgtccaggggcagagggcccacccagggtacctcgtggagaagggagagaagggagaccagggcatccctggtgtgccaggcctcgacaactgcgcccagtgctttttgtcactggagcgcccaagagccgaggaggcccggggtgacaacagtgagggagatcctggctgtgttgggagcccaggcctacctggtcctccgggattgccaggccagagaggagaagagggtccgcctggcatgaggggctccccgggtcctccaggccctatcggccccccaggttttcctggtgctgttggctcccccggattgcctggccttcaaggagagcgaggtctcacgggcctgactggagacaagggggagccgggtcctccagggcaaccaggttacccaggtgccacgggccccccaggactgcctggcatcaagggggagcgtggctacaccgggtcagcgggagagaaaggagagccgggccccccaggatctgaaggcctcccaggccccccaggcccagcgggtcccagaggagagcgaggaccccaaggtaactccggtgagaagggcgaccagggatttcaaggccagccaggctttaccgggcccaccgggtcccctggattcccaggcaaagttggatcacctggcccacctggccctcaagcagagaagggcagcgaagggattcgaggcccatcaggcctgcctggctcccctgggccaccgggacctcctgggattcagggccccgccggtctggatggtttggatgggaaggacggcaagcctggcttgaggggggaccctggtcctgctggcccccctggactcatgggaccaccgggctttaaggggaaaacaggacatcctggcctcccaggacctaagggtgactgtggcaaaccaggtccccctggcagcactggccggcctggcgcagagggtgaacctggtgccatgggaccccagggaagacccggtcccccgggacacgttgggccaccagggcctccaggccagccaggaccagctgggatctctgcagtgggtctgaaaggagaccgaggagccaccggagaaaggggccttgcaggcctcccaggccagcccggcccccctggacaccctggccccccaggcgaacctggtacggatggtgcagctggcaaagagggaccccctggaaagcagggattctatggacctcctggtcccaagggtgatccaggagctgcaggacagaagggccaggcaggagagaaggggagagccggcatgcctggtggacctggcaagagtggttccatggggcctgttgggccaccgggccctgcaggagagagaggccaccctggagctccggggccttcggggagccctggcttgcctggtgtgcctggctccatgggagacatggtgaattatgatgaaatcaagaggttcatcagacaagagatcattaaaatgtttgatgagagaatggcttactacacctccaggatgcagttccccatggagatggcggcagctccgggacgaccagggcctccagggaaggatggtgctccgggcaggccaggtgctccagggtcacctgggctccctggtcagattggcagagaaggacggcagggcttgccaggagtaagaggattgcctggtaccaaaggtgaaaaaggggacattggtattggcattgcaggagaaaatggtcttcccggccccccaggtcctcaaggtcctccaggctatggcaagatgggtgcaacaggaccaatgggccagcaaggcatccctggcatccctgggcccccgggtcccatgggccagccaggcaaggctggccactgtaatccctctgactgctttggggccatgccgatggagcagcagtacccacccatgaaaaccatgaaggggccttttggctgaaattccccacctgcctttggatgaaagactccgttgggaataaatggccaaagcttataggactctgtgacaggttgtgaatgttttttttttttgttgttgttgtttttaattgctgttaatattttttaaataataaagaaacaaaactatctgccctttcccttccagtgggttcctctggtgctgcagccagagctccctgttgccctccttttcccgtttagtcccaggaacaaaaagggcatttgggtacaggggcatatacctgtaatcctagctattcaaggggctgaggtgggaggatcgcctgagcccaggagtttgagaccagtctaagcaacataatgagactcagtctccgaaaaataaaaattaaaaaataaagggtatttccctccttaaaaaaaaaaaaaaaaaaa

SEQ ID NO: 29023 - DNA, 3160 bp, Homo Sapiens
agcgaccgcagccggggggacgcgggaggatggagcaagtggagatcctgaggaaattcatccagagggtccaggccatgaagagtcctgaccacaatggggaggacaacttcgcccgggacttcatgcggttaagaagattgtctaccaaatatagaacagaaaagatatatcccacagccactggagaaaaagaagaaaatgttaaaaagaacagatacaaggacatactgccatttgatcacagccgagttaaattgacattaaagactccttcacaagattcagactatatcaatgcaaattttataaagggcgtctatgggccaaaagcatatgtagcaactcaaggacctttagcaaatacagtaatagatttttggaggatgatatgggagtataatgttgtgatcattgtaatggcctgccgagaatttgagatgggaaggaaaaaatgtgagcgctattggcctttgtatggagaagaccccataacgtttgcaccatttaaaatttcttgtgaggatgaacaagcaagaacagactacttcatcaggacactcttacttgaatttcaaaatgaatctcgtaggctgtatcagtttcattatgtgaactggccagaccatgatgttccttcatcatttgattctattctggacatgataagcttaatgaggaaatatcaagaacatgaagatgttcctatttgtattcattgcagtgcaggctgtggaagaacaggtgccatttgtgccatagattatacgtggaatttactaaaagctgggaaaataccagaggaatttaatgtatttaatttaatacaagaaatgagaacacaaaggcattctgcagtacaaacaaaggagcaatatgaacttgttcatagagctattgcccaactgtttgaaaaacagctacaactatatgaaattcatggagctcagaaaattgctgatggagtgaatgaaattaacactgaaaacatgatcagctccatagagcctgaaaaacaagattctcctcctccaaaaccaccaaggacccgcagttgccttgttgaaggggatgctaaagaagaaatactgcagccaccggaacctcatccagtgccacccatcttgacaccttctcccccttcagcttttccaacagtcactactgtgtggcaggacaatgatagataccatccaaagccagtgttgcatatggtttcatcagaacaacattcagcagacctcaacagaaactatagtaaatcaacagaacttccagggaaaaatgaatcaacaattgaacagatagataaaaaattggaacgaaatttaagttttgagattaagaaggtccctctccaagagggaccaaaaagttttgatgggaacacacttttgaataggggacatgcaattaaaattaaatctgcttcaccttgtatagctgataaaatctctaagccacaggaattaagttcagatctaaatgtcggtgatacttcccagaattcttgtgtggactgcagtgtaacacaatcaaacaaagtttcagttactccaccagaagaatcccagaattcagacacacctccaaggccagaccgcttgcctcttgatgagaaaggacatgtaacgtggtcatttcatggacctgaaaatgccatacccatacctgatttatctgaaggcaattcctcagatatcaactatcaaactaggaaaactgtgagtttaacaccaagtcctacaacacaagttgaaacacctgatcttgtggatcatgataacacttcaccactcttcagaacacccctcagttttactaatccacttcactctgatgactcagactcagatgaaagaaactctgatggtgctgtgacccagaataaaactaatatttcaacagcaagtgccacagtttctgctgccactagtactgaaagcatttctactaggaaagtattgccaatgtccattgctagacataatatagcaggaacaacacattcaggtgctgaaaaagatgttgatgttagtgaagattcacctcctcccctacctgaaagaactcctgaatcgtttgtgttagcaagtgaacataatacacctgtaagatcggaatggagtgaacttcaaagtcaggaacgatctgaacaaaaaaagtctgaaggcttgataacctctgaaaatgagaaatgtgatcatccagcgggaggtattcactatgaaatgtgcatagaatgtccacctactttcagtgacaagagagaacaaatatcagaaaatccaacagaagccacagatattggttttggtaatcgatgtggaaaacccaaaggaccaagagatccaccttcagaatggacatgattcagggagctagaagacactttaagttatactggaaaattcaggtgccactgaaagccagatttatagtattccatctttaatatgtgggactaacagcagtgtagattgttaccttaatattttttgctgggaccatctacctgccttatactacacttaggaaaaagtattacatatggtttattttgaaacttcaagtattattgccttaatgtctcttaaccctgttacacgctgcttgtagacatgttaatatagtaatacctttatgatatattgagtttaaggactactctttttctgttttatcatgtatgcattattttgtatatgtacagggcaagtaggtatataatttgataaagttgcaattgaaatattattaacagaagatgtaagaaatttctgcatggtctaaatctttgtgtactttatttgtaaattatttgccctggagttttagaaaatagtttctgaattttaaacttgctggattcatgcagccagctttgcaggttatcagagatcaaagattgtaataataattttgtaaattgtaagcaaaaagttatttttatattatatacagtctaattgttcatcctaattgttcctgttttcatctagtcagagattcagtaagtgccttggaacaatattgaattctcttagcttgtgtgtgtttctttaatatttgaactcaagtgggattagaagactatcaaaatacatgtatgtttcagatatttgacctgtcattaaaaaaaacaaacagttttacagtg

SEQ ID NO: 29024 - DNA, 1496 bp, Homo Sapiens
aaattaccgtggagacacctgcaaaagcgggcccaggatgctgtgatcatcctggggggaggaggacttctcttcgcctcctacctgatggccacgggagatgagcgtttctatgctgaacacctgatgccgactctgcaggggctgctggacccggagtcagcccacagactggctgttcgcttcacctccctggggctccttccacgggccagatttcaagactctgacatgctggaagtgagagttctgggccataaattccgaaatccagtaggaattgctgcaggatttgacaagcatggggaagccgtggacggactttataagatgggctttggttttgttgagataggaagtgtgactccaaaacctcaggaaggaaaccctagacccagagtcttccgcctccctgaggaccaagctgtcattaacaggtatggatttaacagtcacgggctttcagtggtggaacacaggttacgggccagacagcagaagcaggccaagctcacagaagatggactgcctctgggggtcaacttggggaagaacaagacctcagtggacgccgcggaggactacgcagaaggggtgcgcgtactgggccccctggccgactacctggtggtgaatgtgtccagccccaacactgccgggctgcggagccttcagggaaaggccgagctgcgccgcctgctgaccaaggtgctgcaggagagggatggcttgcggagagtgcacaggccggcagtcctggtgaagatcgctcctgacctcaccagccaggataaggaggacattgccagtgtggtcaaagagttgggcatcgatgggctgattgttacgaacaccaccgtgagtcgccctgcgggcctccagggtgccctgcgctctgaaacaggagggctgagtgggaagcccctccgggatttatcaactcaaaccattcgggagatgtatgcactcacccaaggccgagttcccataattggggttggtggtgtgagcagcgggcaggacgcgctggagaagatccgggcaggggcctccctggtgcagctgtacacggccctcaccttctgggggccacccgttgtgggcaaagtcaagcgggaactggaggcccttctgaaagagcagggctttggcggagtcacagatgccattggagcagatcatcggaggtgaggacagcgtctgacgggaagcctgatctggaaccttcccaaggactcaggcaagcctttgtggctggatcatgagaggagggactccatcttgagccatgtcccccagcctggcatgcgtgcactgtaaacgccaatcggggggtcaccaggatcaaccgcaggctttcttcagtcccttggtcagaccataaactgcatttttgattctttgtggattcaaaccctaggatccatcagtcttgcaaggacattgaatattaggaggaaaaagtcatggaaaaaataaagccatttagaacctgg

SEQ ID NO: 29025 - DNA, 97630 bp, Homo Sapiens
agtaggactagctatgagaatctaaaacataggtgacttctaagtttataaattaagaaagactgttcaggaatggtacacacttttttggtattgtttaccagcacataaacttagcaatgtattggtgttcataaaaagagaaagtctgacaataaagcaattttccaaagaaataacacttgaaacacatgttgcaatgtaattatatttgtggactaagaaaaaaagactacaagttcttcaaagataaacgattaaatctttaatctaaattctggactacaatttcatacagcttcacgtctgggtttaagtcaaatacaaaatagactaggatgcatatggcaactatattgagtgcactccagtttttaaaaaggtttaattcagtcagacacccatttctttggttaccaagatgccaaacaatggattctataagacactttctttcaaacaatcgttttgaaaatataaacattaatgtagaaagagggattcagaaaaatgttttatcaaatcaatgtattatgctctatctgaaatgctgactaacagagtcagagcacaatatcataagtgcatgaccttcttcagacatctgtcttttcagttatattgtattattcaaattactcaaacccaatctccccagcccaaagtgatgatttgacaactgcctgatgaatttagcttttaaaattctagcaagccttaattatccaactaaatcagaccaggattaagagatactcttaaataaacaaggagatagggtgtttattttatggacaagtttcttttgtaacttgtaactcccttgaaagtcagccagagtatgtctcaaaccaaagtcaagatagtgagcaagaagtgttgcacttatgaagggaggtgagtgagcaatgcatgtggtttccaaccgttaatgctagagttatcactttctgttatcaagtggcttcagctatgcaaggaaaccaaacaggggaagttttctcaagcaggttgaaagcaggttccaagaaagccctttgaaaaatgtctaatcctttcaattgtctagaactaaagccaaaaacataaggaaccagattcttaggaataagtttcctgccctgagtgactgaaacagaatcagtcttttagttgagcttctcagcagaggaaacggggagaatgatgatggtagtgatggggggtttctctgaatagttgattttctaggaaaaccatgatcaactttggtccatttacaaagccgtgatcagcagaaacttcctgactagcaatcgctccctctcaaccagatataaccagttgatctggcagtagctctgctgctgtgaacctcacagctgaagcccaaattcagattcaggataaagcattagaaaaattatttatttttatacagaaaattagccaggtgtggtggtgtgcacctgtggtcccagctactcggaagactgaggctggaggagagtctgagccaggaggcagaggttgcaatgagttgatattgggccacttcactccaacctgggtggaaaagaccctgtctcaaaaaaaaaaaaaaaaaaggaaaaggaaaattacttattttccatttacacattcattaccaactttctgttcagcaacacctaatgtcttgattatagaccatagtaggtaaaagtacactggaattcaatgtatttttcatttgatatcaagaagcaaaattcacctaagtttcaaatactaagggccaaatttacaggagcaattaatattaaaagtcagcattaaatttaggattgaaaaatgtatcttgatcatcattcacaggttggttgtgtttcttggtttcaggtattaacagggctctttctttaacagttatttgaagatagcctaagaatttaagtccccatggacacaacatttatcacaattcaaaaacttcagtgaggcactgtgtgaaagaatcatcactacctctctcaaagcttcaagacttgtggtcttaaggaaagaaaagtatgcatgtacagggtggtggtccaaagtgaggcacaaaaaaagagaaggccaggagggaagccaatcctgggaccaacattccacagttcctcttagattaaaacaagaatgaacgggcttcaattggttttatttctttaaggacttcctgaaaatgatcattgttatcctctgattaaagactcaaaggaaactatacagtagtcagtcccctacagaagaatgagtattcacctaaaggcagaaacatgtaccacctaccttcagcagatccctttccaccctttccagcagatctggaagggatggcacccttccgggaccccaacactgccatcctcagaacctctgagccagttatgcagtccttctcagaccctcgattctttaagtgacagaatgcatagcatgagcacctgccctgatctaccatccaagggcccatgcatttacaaaaaaccaactggtgcagagagatattcagcctgacctagattgtccagaggattgattaataaaacacagataatcggctggatgcagtggttcacacctgtaattccagcactttgggaggccaaggtgggcggatcacctgaggtcgggagttcgagaccagcctgaccaacatggagaaaccccatctctactaaaaataaaaaaaattagctgggcatggtgatgcatgcctgtaatcccagctactcgggaggctgaggcaggagaatcacttgaacccgggaggcggaggttgcagtgagccgagattgcaccattgcactccagcctgggcaacaagagtgaaactctatctcaaaaaaaaagaaaaagaaaaaaaagaaagaaaaagaaaaaagccacagataatcgaaacccagatgatccagaaacttctttgtagttgtcattttccatctgtgcttccagccctatctcctagcagctcctaactggaagtcaaacttactgcctttcatttctgctccccttgcctgtcctttcacagaggtggtaataagcccaggtcactaacaggatgcatggaggtctggattgtagtgtttggctccagggtaatcgaggtaatcaccactgtttaacccccacaaagttgtgaataatcatctcacctaataagttgattatatttgcaggaagtcagcctcataccaaaccatccgtttttgtcatgaaaaatggaacaaatgtcgcttgtctggtgaaggaattctaccccaaggatataagaataaatctcgtgtcatccaagaagataacagagtttgatcctgctattgtcatctctcccagtgggaagtacaatgctgtcaagcttggtaaatatgaagattcaaattcagtgacatgttcagttcaacacgacaataaaactgtgcactccactgactttgaagtgaagacagattctacaggtaggctatttctagcttcaaggagctggagattatggggaacaagaattgggtgaaagggaagttagagatgtaactgtggacaaatcattctcagtatagcatcatgctggaaataagacttaggcccaactatagcctgccattggcaggggagggaaatgcttgtcatccctaagatggaatctaaaataaagcccatcttatttcttcctcatctctcctctttacctaccactgtccccttcatactagactctgggattgaaagtcctcgtgcattctaatccagtgctaaattccaacaaagggcaatgcggcctattgtggggctaagaatcctagttcttcccgcatattggtgtgcctggatgttgacctcatggtacaatgaaaaaggctagaatgggaagcatgttgtataattagctatgtgaccttcaccaagtcacatcctctggtcctcagttcactcacccaaagtctcctccagttttaaaagcctacaatcctgtgagcctcttcattcccaatgtaaccctgaccactgctgtttgttccagatcacgtaaaaccaaaggaaactgaaaacacaaagcaaccttcaaagagctgccataaacccaaaggttagttcaaatcaaagggccaacttcagaatcaagggttaaagcaaactctgtaattgtccactggggccaaaatgtatcagatttcaaaagaaaacacaaaccatgctgagcccagttggttctgcagagcctctgactctcccagcaaggcttacctggctgtcggcatcggtttcccaagcttgcctggctgggtgtcagcagcagcctaaggtctctgacggctatctggcaccatgctggacttgcaggccagaaagaactaggcagacttggggcaggctaatatcagtgttgcaggcccaatttctggaagggaatttaatctctccctgaagccaccctcttcactctttttcagccatagttcataccgagaaggtgaacatgatgtccctcacagtgcttgggctacgaatgctgtttgcaaagactgttgccgtcaattttctcttgactgccaagttatttttcttgtaaggtaagaattagccgcttcttattcctatctctacccacaccatgctgcacatggggaaaggggatttagaaatggctaagaaaccaagaagcattggaaagggaaaatagagacatacttagaattaataaggtaggctatctcagctactcagcaaaacagcaccccatttcctgttatcctttcattttgagtcagactgaaacccattaggtagtataatgtactatttttctaatataccagagaataaccctcactttcactccagggagaaaactgaagataaataaggagaattcatcttctttactgctattttgttcatcgaccaagagaccatgggttatttgcaaggccataagtaaagctttgcctgaagactatccagaggaagcagaacctatctttgtcctgataaagggaatgccagctcacactccttaatcataggaccagcctgtctatgtgtggatcagcctgtctttgggatgaacctacacacagcattagtagtgaacagctcactattagctactcaggatgcatacacagttaggtttgagatgtcaattatttgcctgttacttgcattccgttctcaggtaatctcatacacgaaattgaaaccagggcctgggtttgcgtgtgaggcttctccccctcactccttctccaatactcacaaatgctcatcaaccccagcttctgttctaggaacaaccctagactcagagtacttgactgatctgacccagacagtaaacatacccagtcatctcaaaaagggggtccagctcacctgttattttactaacagtcccagggacacaggcagtgtggctgggtaaaaagagagctatactaagagtcagaagatctgggttttatcctgattttgacactaacttacatgttaccttagccaggtttcttcatctctctgggcctgggtttttgcatctgcaaaacaaatgagttaaaaaaaataataaccaaaggagaacaaaagagtctcatgacttgtgccaacactgatagctgaactagctgagctattgccatgtgtacatggaaagtgagccacaatagattagtgatgtctgcaatggtacagtatagcaagtaccggccaaccccagactacatgacccctacgattccttctagcactggcagtctattctataacaactttcttcactgcaggctgactggcatgaggaagctacactcctgaagaaaccaaaggcttacaaaaatgcatctccttggcttctgacttctttgtgattcaagttgacctgtcatagccttgttaaaatggctgctagccaaaccactttttcttcaaagacaacaaacccagctcatcctccagcttgatgggaagacaaaagtcctggggaaggggggtttatgtcctaactgctttgtatgctgttttataaagggatagaaggatataaaaagatataggactctttttttactcctacaagtgatacactttgaaaatgatgttttgttccttttgactttctttaccttttgaagtagaaagtgggaaccaacaggttcacagcttcattcctcatgaggcaaataggccttgggagaagaagagcgggtgcccttttatctaaacatggaaggctctgctcaactgagcactagatttgctacaaaccagcatcatcttcttcctcctgtcctcacggcttgtcccaccctctatgttcacttcaggagccacactagagattctgcatggcgtggaggaggacaaagtttcagcactttctgcctctcctaatactttacaaatgagattacatttgaatttgctaatactttatgagcaggcaatgaggtttccaaaatctcatctaaatactctccaatctattagcaaaaatcagagtaaaatacagaggaaaggcactgctttctgttaattgatttaacatgcatgaattagctccctctgagttccaggcactatgctgagagtacaaagaagacacaagtctgctttcaagcaactcactgtgaaagtgtttttgaagggaggaacagaaatgagacccctatctttccctataaaaacaacatttttactgtcttttgcctgccaatctgtatttgaaaccattggacactgattctctggcctgggactttggcattgatggttttctgcctttcttctcagcctctgcctctattgcatttattaaactgcattgtgtgcacctcgcctctggctttactctttgcagatcaccacagggggaaactcagctctgtgagctcactattagtcagccaaaagccaaattgaacttatgggtcacactgcactttcctgagccccaagcctacagaggccctgccttggagacccagcctcgggtttcctgctgcctctgctgatgccgctgttacagcaagagcaacagcagcacctgcagcgtggccagtgacctctgctactgccacccaggaaggccacagccttttccaggagcactgctcaggtgcagagccctagcaacccattattgtggttctctcagcacctatgtggagcatcaagtcgggggttatgaggttacaagtgaaagagtgactgtcgccaacaactccacttgccatccccgacagcaaactcccccatcatgtctactacaccttgtatgtgtaaggaatgctgatttccaaaacattcacgagttaccttgtgtaatattagggtgtttcctctgaagttgttaggaacaaaaagatcatattctcatttttcagataaaacaaaaatgccctctcctcaaaaaagtatgtatcatgtccagagtcattcagtgaggcagggatattgctgggagcagaaccaaggtctcaagattttcagcccaaagttcctgctataagaacatactgcatccccaaatgaggacaagatgtcaaagtgagtatcagctagaatgaacttcaggattgtcccatatttagcatataaatgagccaccctctagcccactatgccagaaacaaaaaaaatcctggcatatcacaggaccatgaatttcccacaccaaaaggagcctccagggaagatttaaggcaagagccaggagggattatggctgccttctgatctggggccatgatatgtgaactgtgagatggacatgtgtcacactcagtaggcattagaacagaagccccagaaagccaagccacatgcccaaggtctttggctccctcatcccctgttctttccattgttctatacagtggctactcttgtccactgtttctgaagagcacataaactgctgcccaaaccactcactgatagagccacctagggtacagctgcagaagagagccctggaagtgtaacgctgcatctctgggcctgtcattatccaggtatacgactttgagaatgtccaccatgtctctggactgcagtgtagtttctataaaataacatgtaaggcctcttctatttctaagattatatctaataactctaatagttctattaaggcagataattcaagagaagaggaaggagggactgattcccagggactgagggtgtgtatctatttcaacatcacatagtcagtttgccccagaggaaattttctctgccggagacaccactgagcttcaaactcagggacttggcagctggaattctggaagtcacaactttccaggagtgcctcagtgctctgcagtgaaaaaaaagaaaatgttctccaaataaaataagtaaaatggaggtgtcaaagaacatcaaggagaaggtggctggatataaaaagatgcgggaaaaaaaaagtaaattggtgaaaagtcttttaagtaaataactttgtgtctaacttaattttttttttttttttgagacagaatctcgctctgtcacccaggctggaatgcagtggcaccacctcggctcactgcaacctctgcctcctgggttcaagcgattcttgtgcctcagcctcccgagtagccgggactacgggcgcgagccaccacgcccggctaattcttgtatttttagtagagacgggtcttcgccatgttggccaagctggtcttgaactcctggcctcaagtgatctgcccgcctcagcctcccaaagtgttgcaattattggcatgagccaccacatctggccctaatttaattctgcaatgaaaacagatcaattcataataatggataaatggtggtggtgactaaaataaagacacggctgacggcctcgccttagatgggccctttacctgcacctgaacctgcatcctgaaacactcacagaaaatgcagcacaggcttgtcaagcccctttctgtatcgggacgaccagggcaccaggggcacgaagacagcgctctgtaaacatgcagttctcctttgcctaccaggagtcattcaggtggcaagggccccgtgagtcagaagtggggagatactctgtttctctgaagccagggtgctcccctggatctgaccaggccatttatttctcagaagacactttaggtcacttctaaaggccaggctggaacccaaaatggctaagagaaggatgccaagtcccagacatgacctgccctaagaggcagctctgctgagctgtgccccaggagtttgtgttatgacttcctgggcacctgcatcatagtgctaaaggcacagtagtaagtggcactgtcttcagtccttactggagagatcaccaagtgaaaggctttctgggtcagaatgtgtttcacagaaaaccgtccttgagtaaaatctgcaccttctgatctgctgttatccccataaaagacaaactgaaaggaataatctggccttatccggtaccagaataaatctggatttgaatatacagtgtcgtaagtgcagagcagtaccacctcactgccactcgccaccgtctggtccggggaactctgggttactttgtcacacagcgtgcccctgtctgggaaaaagacaatgaggaaatagtgaattctgcaccccccagacagtgagtacagcacatgcctagcccagaagaactcaatgagcagaggcaagagaaggacacagaaataaagccaaaggcagcaaataaccaaaaaccaagagtgcaagagaaaaagccttcaagagtcagagaaggagaaatggggttatagagcaagtggaatgtaaacaaatgaaactacttacagaaaaacaaaaagctaaagcccacagtaagaatcatcttttcttcatatcagggcagaggatatacaacaaaacagggttcctaagatctcagagactatctgacggttctaatgaaagaagacgggaggaaaacaagaggagactggcagcgctgacggtcatgtgactgattcagctgtgacttctagaggcaaatgcgctcagccaaggaaactgctattgctattatgattttggccccaatccatcttgaactaacacatatgacaatgaaaaatggattacttttaaaaaagaaaagaaaagaaaaacaaaggaagggagagagagaggaagtgagggaggaaagaaaactgcaagactaatgatggcgttcttggatatccaactgctacaaaagtagttcactctccatttctgtatcctctggtcacagactggtgtactagtccattaatcacatgtcgtactttgagtgacactgtctcatagcatctagcacggctccacacactttgttctattcaataaatggaataagtgaaagagtaccttggacaactcccttactcctctgtgtaaagaggaaggaaagggggttggaccagattctttctaaaatctgtcctagacctgaattccagaaatctttgatttcagatgcttgagggagtgtcctgatcctaagtgcttcttgcacttcaccagcttgactttccatctctcactgggcccactgcagcacacacttggctccagctggaaaatcctgaacagagcttcccggcagtgaactgcataagtgggttataagcttgctgagatagtgttcagagtgcccatgtacctggggtggctggagcccctgagccagcccctcccagtcaggagcactacaaatacagttttccatgtaagccatcaatatgacaacagttgggaggcactgctgtgaaaaacagaacactgactaactcactccccaaaatgcaggagtgttcctaggagtatttctagaaggtccttcatttccctttttccctacatccacttcatcagtaagacctgtcagttctaccatgaaaatatatctccaatccatctacttcttccatctccactgcaaccaccttctataaacaccatcatctcttacagggactgcttcaataacccactaactggcccccttgcttctgctcttgtccctggacaatccattctccagttcttcataaaatgtacatcagatgatgacagctggacctccttcccaggcctgtaacatctgcaaacgatctggcccttgcttcctccccagcctcacctcacatctgctccttctctttcttcccttcagctgcagtggccttccttctcgtcctttctatgtctctcttttctagctacctgaaactctgtctccaatttttcacagttctcagctccaactaaattagtcacccatgccacccataaccaacctcaattacatctctgttcttattttccctcacatcactatctgaaatcatcagattcatacatgtttattttatgtctctcccatctcacctctcccctacacacacacacacacacacacacacacacacacacacacacacacacacgataatataaactatatgagggcagggagcttatcttttcactgatatgtctccagcccctgggcttgtgttgaccgcatcacagacaatcagtaaatatctgtgtaaaaaaaaggaatgcaatttcttcacttaaaaactcaccattcacctagatttaggaaataaaaatacaagacacccagttaaatgtgcatttcaaataaacaacaaaaatttcagtaatacgggtagctgggacatgccatatttggaacacatttatactaaaaaagtattcattgtttatctgaaattcaaattccactgggcatcctgtgttttatctggcaatgctaggcatgcagaataccaaaagtaagcaccaggcaggccagagtcccaccatgagcatcttcagggcccctggatgtggaagagggatgttgagggcccaggggctgccttgccggtgcattggctgcccaggcctgcactgccgcctgccggcaggggtccagtccacgagacccagctccctgctggcggaagtccatttcagagcttccggttctcccaagtccaaggattatgctcactccccacccacagtctcttagtgtctgtccctgctctaaagatgttgtctgggcttgatattaatatgagagctgactgttcccttcctgatctagaccataaccatcttcaagttaaattgctcctcctcttctaactgcccaacctcacccacgtctgaccatacccaagcacagagaagtgggtttaatggaccttcacacagaaggacacatcctctcctataatgctttacatggaaggttcagacataacctgagtcctgcttggggtagcatcatcatgactctcttgccctggtgtccttgcaatattccttgaaaggcatccctcccccaaggaagggcaggcactgagcacagcaatgcagtataatggctaagagtgggatcccggagccagcctgcttgggttcacatcagctccggcttttaccagttgtgtgaccttaagcatgccctaactctccaagtctcaattgctccatctgcaaaatggagatagtaatagcttttctcacaggactattggaaaatttagtgaggtcacacatgcaatacacccagcagataaatgatctatgaatgtcaggtattgctgttgcatatttaatttaaatgttgccatttttattaaatagacatatgaatagagttcctaagagtgttactctcatcaatgctgctcagggaaaagatgctgagtaaatctaaattttaaagttgcaaaatctagcaaaagattgttgatatgttgtatcaatcaatggttaaaaaaaaaagactgacatctttaatttgctttcagtgctgcaagcatgtcctagagctccgtgatcccctgagacctgtgatcctctgagacatgagccagctgtgctctccccaagtccctaagagcattaggagcatgagaagtgagcattccagccccttgttcttatgtcttccaaacattgtaacaggcttgttcatgagaggccacaatgcatgatcaagtgaccccaccactgaggaataggagaaagcctcaagattcagtggcccactaaggacgtattgccctaagtttctccaacccatcttcctattggcatctggagactatgcctcttcccaaggtgctgagggtgctgcagaccccacttgccctgcaggccccacccgcccaccagcgaagaagggctgcctttcattagcccaaaactgccactcaagaggggtcctcagacaaggtgggagccaagagatttggcgaacgtcacccttgtcccacagcttggatcttgatcactcatatcactcagaagagggacttttctctcttgtttcctttgaggtgggcggctttgtttttgacattgtagcgccctctgctgctactaattatcgcatctccataaataggtcatactggaggttgatagaaaatagatcagggaaggaaaacattctttgttcacaattcaagtcaaagctgctgcttctgtctccattcccttttcaactctgagactggcagctgcttctctgttggcccaaagggactatcctccaccagtcacccaaagaggactgtctttaaggatatgagatagcaccctaagaggataaatggacattttcttgtctacaaaaagcctaatgcaacagtagaggacatagggaaatttctttggatggatagagacaagtgcatctctttcttacgaaagaatagaaatgtgattaaaaaggaaaagcctagaaacatctgaacgtgtggaaatgggggtgagtgggctagagaaaggatttctgcatcactttcttcctgtagcaattccatccgagatccctgggacagacctggcctgatgaatagcaggaagcacaccagggagggacaaggtcctgcagacaaccttcaccaccaggctgggacagcgccatggggacccagggcctctgctttggggaaagaccttgctgagggccccatgggcaagaacaagtgtgaagaaccctactatggttttttgcccaatgccctccacaaagccagcgtttgaaggaaaactgtgaggaagaagggacactccatggtgttgttgttgccacctctggagcagcctgtagcaagaacagtcttggtccaaccaggtcagtgatactttttatgatggggctgtgtgggacctgacctgactcttgctaaccagatttctaaagccatctgcagggtcttttctcctattattccccagggcagggagggcaaacagattatatctccattatcaagagctaacaattggtagagactatgcggagcatgctggtaagaaagattctgaggccacatctatactcagaggaagagagtgatgtgtttattagcaatatttaccaagggagcagaagcaggaggcaaccccacaccattttgtatttcccattcctgctctcgatgtcattccctgaaatgagtcctgcagagaaagaataatcagagccaattctccattggattgtccttttggtaaagggcaaatttttccatttctgtcttttccatggaccatttcccctgctatcaattgctgttgcctgcagcctaagaaataaaatttttaaataaatgagaacgttctataattctctctaaaatcataaacaatgtgtcaaggccaaacacttccctggtgtgatttattcctatgtggactcatccttgtataattagcaggaataatcacaccctgagccagctggcagagcccctggggacagagaccacccaaagaaggtccttgttctcctgagtcacataaagggagtcacacaaggcgggagtggaactcaggtgtccggagttctagtcccagctctgcttctacctatctacatgaccttgagcaaatttatcccgcagagcttcagcattttcatctctaaaatgagggcattggcccaggcagctgttaaatttccttccaagtctcacattctaggatgctaatgtgtaaaattatagaactgacccaagagttattagttcatatccccctgtgcatgttgcttgaactcctcattgcccagcaggaggaaaagggaaaacatgtttcttcattggggggtagcataatttcctggttgactatgtgtgactcatcagagcctggcggtccaagcccatatgccatttgaaatccggttattattacatctgggagagagaaaagtgctgaaaacagcctttgggacactatcgatttggccaaaaaaaaaagaagaagaagaagaaggctctgtctagtgtgataacattttgttatcttattcattgtcttcatccctgaaatacactctgctctctcctatctctgctctgaaaggcagaaagagggcagccctctccaaggcaaaatggggctcctgtggggaacagaggggtgcctctgtcaacaaaggtgatgccacatccctttcaaccatgctgacacctctggtttttgtaaaggtgcccactcctgtgggtaccgggttaataggaaactgacatttggagccaacactagaggaatcatgaaactcagcaagtaatatttggcagaatttttttttctatctgaaaattatcagtgagagattctaatgtgccttaacaaacaggaacaaaagatgagtgtttaatacaattcaatttaacaaatatttattaagagcctacagttattcccatggatcatctgagtcagtttccgaggaaacattatcgttgccttaagggagctggggggttgtcaacgggccagaggtgggatgaaaaatgacaacagatttacctctgggaccgggacatggttaaccacagcggccctgggtaagtagcttagcttcagaagaaaatgtgcccaacagcatgggtaacctaaaacaccgggcaatccaaatattcttttatgattggctttacgatgtattttattcttttgtagggcaggtttatctcaccaattatatattttcttaactgacctgtaaaatctacaggggaaaagtattttaagaattatatgtttctgcaattaggctcccagcagtcaacaaagaagtggtactttttgtctttccagtgatgaaaaagggaacctggcatccctggtggcccaccagcgtctccttccctggcctaggtcagaacaagccgtaaatcagcaggccgttatcttcttataaatctgtagagcagggtggacaacaaaaggcagcctgctaggttttcagaacatgagttccttgtgtagccagagaacctgggaccatcctgacgtggctggtcctgctgtcctcacagcctgaatcccaggctgtatgaataggagaggttcaagtccagatgactgttcacgatgctggtcccccttgcatccctaatcatgctagagacatgaccagggtctgagaggaggaagttacagcacagcaccaacaggggcttttggtaaagggcctgggcactatgtgaagatcacctagatgctcaactttgggaaggggactgagttaattgtgagcctgggtgagtacctcaactccagaggtagctttagcggaacccctctatacctaacacctggcaatcagagggctgaaacacttggccagataatgaattctcttatccggtgggaaaaggctgtaaagatcaaaccacctttcctatgggtaagcaagagtctgtagtttatgtaaaggcagcagctcctgtgggaaggaaggaaacaggaaatttacatttggaatggggacgcaagtgagagtgaagctatctttaaaccaaaggtgtcaggttatttggtttggtttttgaattatctggaagttccaaagaaagaacacttctccctgaggatttgattgcaaaattctgacttcaaacttctaaaaagatcaaatgttaaatcagatagtaggcttggaaaactctatttctctatgtaaaaagtagagaactacttttcttttgtttgatcattttattttgtttaggaaataagaggattagataccctggtggtgagtggggagggcagggacatttgcacagcatttctggataaattagatccaaataatcaaatcaaagactctcagctcagaaagtaattaaagatctcctcacccacctctttaattttgcaaatgaagacagtgaaactcagagaggttatgaacttgctcaaggtcacacaactgatcctgatatcaaggtccagggcaaagccaagacagctcatagttctcaccagcccagacccaagggagaaaaaaacatcatagtccttggccacggcagcatcatttgcatcccaaacattctttacccaagacttaatgaactcaaaaagaaatcctgagttccaaagggaaataaaatcattctgcgtctgttgaaaaaaaaagcaagctaaagtggaacaataattgaacttgatattaggggaaaggtgcagccatctgcagactgagagaagggtgaaaaaaacaaaatgaaaatgctagtcttgtgttcagacaatgattatgaccatagaacactacctataagttctgtagagctaatttctttcccagtgggttgatattctatgatagattgcatcagcggtgtgattgttttggaccatagaatacgtatacagaattggcttgttgagccttctggtgtcttgaagtgaaaatcatatctctggacatatctgtcaggcctgaagccctaggctactggaaagaaagataccatgacttatccttcctctaaagcttagaagttggagaaaaattctagttcttgggaagctctgcaaagcagggttcgttaagctgatgccacaggtttttgcaaagcccctcagcacagtgtttaagaaaccagtggctctaggttgacctttggggaaggaacacagctcacagtgaatcctggtaagtggaggggagcattgaatcctctgcctgaatgtatccattttatgccaatgaattgagatatggcttcttgccccatctctgccacattcaagtcctgcttggctaaacaatgctcacggatgtgcacgtgtgcagtgggatgcagctttttctaacctctcacaaaatcacgcaaccccttcaccaaactgcttggtggctcttctgtgccctcacagcccttctagtttagcagttagaggaagacaagtgcccaagggctttctcatttttaggtcattgtggaaagaggaacgttggtgatatgtttgcctgcttgggaggaaaataataatgatgatttactcattggtttctatatgctagttgatgtgctgcattctttctcttatcacatttaatccttataccaggtctgtgagttaggtgctattattatcctcattttatagaagagatatatttatattttatatttctatagaagcacagagatgttgaataacttgttcaagccgatgaagtaagaaagagaacctggagtttaattcttggcactcagattccagagctaaaagcttttcagtgaggggattatgtctagagggaatgtccctgatgctctagtctctaaggttgctaagataatcgctaaagaactgcgctctcagcaagtaaagccaggggttggtcaacaggaccacggtgacccagttacatattcttaatccttacaacatcatcaagcagttgctgttttccccactttacaagtgaggaaactgaggtgtagcaagttaggaaacttgtcctgagttttaaactcaagcctacctgccccaaagcctgagctcttttaaattaactgcaactgctgaccagttagattaactaattacttaattaataagataacaacctaacaggctgtaaggtaaaaaagtaatcagatttgttctataggtcccctcccttttcgggaatagctatacaattgtataattttatgcttcccctgggagagtgggtggagccctggctcccagcccgtgatggaagggtcttggcagtatttgtaaagcagtctgtgggggtgtaactcagggcggatctgaaaagctggtctttggaaagggaacgaaactgacagtaaacccatgtaagtctgaataatgcttccaaatttctccctggaaccctgatttccaaattttccattctgttttataacccaggtccaaaccacagcagtcccattaatggattccagtgcaaaacaactgctggtgtattcctactacacgcaggtctctgttgtttgccctcatgtgctattttatctaatagctgagaatgacagtaccaatggagcactgagttaaggagtcagactgttcgaaggcttcattcttcgttataattggtgagattttccatgggactaagagaaaattgattaactctctgagcctctattttcctcctctgtagaatgggggaggcagttcctgttcccattttaccacagccggcgtgctgtgaggggatgttggtacatttccaataaggggacaatgagtgtgaagagaaaggaaggccccaggtggtccgtaaactcttccaccagtcccacactataaacagctggttttatcagggggattcttggatgacaagtaagcacttaagtaaatatcaaggggagtttgggcaactgagtttttgtagatcctcgtgtcattgtgttatactggagccaatagtaagctgacatttggaaaaggaataactctgagtgttagaccaggtatgttttaatgaatgttatttgtttccaaacataagccaccatccttagaaattcagtgaaagataaccgaatctcctgcccagttattagcatctttcaccatgggtctttctggagaaaatgacaatgtgggcagcccctgactgcagcccctttgggactgtttctttaacacctttaagtacttgggaatgttcagtgtgtttttgttaatgttggagatatgtgtctgacaaatggaatctgaattgaagttttagtgtgtaggggcagaaagcatttagaaaggacaaaagaaggacagattagactaaaatacataccaatggctgggagtatgcaatgcaacccaatccaaaaggaaacagtgagatgtagcctgctgattaaacaactgagccagcactccgtgtcagctgacttgtcttcccaaagcttccatgttggtgcaattaggaaaagaattgtctaatccccataactcaaaatcttggagccaagctaaattgggtaaagccgtgtaagattttctggtactgacactgactacaagctgatatttagggaaaagttaagattgaaagcaaatattcaaattagtcagaaagaccacgaacttctgaaaacaagccccagggtgctgttaactgctgcatttctaattgggtcctcatggaacattttcatctctgccttgtctgagctttctgcaccagagaagccccttttgatacccactcacttctgagtccctcattgaaaaggtggcaactaagcttagagaaggattccctaatccaaatgcaatacttgggggaatattttgagtattgctccaccattctcaaaacaaacctaatttcagttaacttgaatgtagctgaaattttgttccatgagggaatctctgctttctatgataatgcaagctcatttcaaacaattgtttgggatttaacttttgctcataattcccaaaagataccaactattcaatgagtatcttaaaataaaactacttttatgaccaaattattatccccattagaatggctagaatcagaatgtcctagtatgtattatgtgaaccccatgcgaccttcctaaagtttcttatgcctaaaacagcataagagagaaaagcatttccacgctaacctgtgtgttcactggttaacaaaggtctaaagagcaggtgagtcagctgctccatttccaaactggactggacatttacagtcctgcagatactaaaaatgataatcaggaaaagcacacacaattctactttttcttataattcccatctttcccaaagaactgttataaattctctcccaaaggtgttatattcatccttcttttgttgcctctatttgtgatgtgtactgaggtgaaatatttgttgagattcaaaaaccccatgagatttaacttaagctttccctgtcagagagattctaagagctaaaagatgggaagctggtatttgggaactagattaaaaagaaaatccaaattaatcccaaggagcaaggctcaatagatagttatttagacataacatgtccaccctgcaagcctagttgctcagttgactgggctgcccctatcttagtcttgcctggaagagaaataagttgtttgccccatacctgtcttgagaaatgtcagcctccagacctgaaagcttcttgtgatttggtttatttctgtagagtttattattatacacagtgttcttgaagtaatagagaagtgcattagaagctcctgcaaatggaaatgaaatgtaaatttagattgtaaatacatgactgcggtaaatagatagcaagaaaaaggatgaagagattagaaatttgccacatttctctaaccctaaagggatgtttctataaatagtttaaaactgtagaagacgaagggggaggaggaaggagaacagaggcaaacagattttctcctaatcctttccatttggcaaaattagaaatggtttttcaattaaatttccctgagcagaggaagaaaccatgtctgtttccacactaaaattcctgtgggtgggagtctctagagttgatttggaggatggatccctgttagtgacaagtgctggtaatgctcctgttggggaaaggggatgagtacaaaaataaatccaagtaagtgtggagggacaagaagatctcacagtgcaggatttcccctggattttctgcattgccttttcacctttcctgtcttagcacgacaaattaggtcccagatgagcaggccctcgcattcaaaccggaaattttaaggaggaagccagattaactttactcgggagacctagtagactctgactttaaagattcttttaatccagctgtttttagggagagctctgtaaaagatgaaagaaatgttttaaaaaaaaattaaaattctgtggggtgaaaacaaagatgttaaatatttgattggcaaggcaactggaaaatctggaccatgtctacaactgctaaaggaggctttgtgaaagagaaaatgagcagcccaaggagatcctgtcctaaacttctctggccagtgaaattcgggccattctctgccacagccctggactgctaggagggcagatcatatgtcttcctcagtggggagaggtgggccctcgctggcagtttctgtaaagcctcgtgctgtggtgtaattcagggagcccagaagctggtatttggccaaggaaccaggctgactatcaacccaagtaagtatgacagggtgaagctacatgcagctgagtacagtcttttcctttctagaccgtgtcctgcaagctctccttgagggacgtatactcattttgcattgtcctttgtagagaagcagaccaggaaagacaggaaagccctcaaatttccacttttaaacacctccctgtaaaaactgtctcgcttccctccccttctacaatcagtttctagtaaatcagaatccggtgaattgatatgcaatttcaacgaaaaaaaaagcagagaaatagttaccccaacaagtgcaaaaagtagaaactatctgagtaccagccaagggaagataattaggaaagaaaaaaaaagaaagaaatggattactggaaccatgatggcagcttagtcacaaagaaaatgataaaaaaaaattaaaattaaatttcaaaaactttaaagatatatacatatatatatatctatatatatatgatatattgtcctctggaactccagcactcacctacagcagctgcattctggacttattatcaaataacctataaacctgtagcttaatgaagagttgagcaatcgtgactatattgacccccaggacccttctgcaaagagcagcttctgttcctgtttctgtaaagccttctgtggctgtgagaatagtggaggtagcaactataaactgacatttggaaaaggaactctcttaaccgtgaatccaagtaagtttgaagggagtgggggaaggggggattcaaacacttctgatttaattacttgcccctccaaaacattccagcttaggttccaaatctaatgtttgtgctggggggatatggtgcccatcagagggattagaactccactgtacaaagactaaattactttcagcccaaaacattcctatcattcatcttaaacaagattattggtgcaaggagaaaaactgaatacagaatcctgagggatccagctaagggtcaggaaatgtttgccgaaaagataaagaggaaattggcatatcgtgactacgcaaatgcagtagaccaaatataaattgtcctgacttagatactaacactcctcttaaatttatcgcctgaaataatggaaccctgcaacttcattaactaatgctgaaaattctataagcaggctccttttcttcttttaccttcactttacctctctgaaaagaactgttctcaatccccagtctggtaactgaggtccagtcagttaactgtctggttaactcaggcagagcatttaaccccactttttccttggttaccaaaatagtggattcagcctccactttacttagttcacctgagaaggggaaaattcatctgtcctctgagtcgtgagaatagagcagtacattctctccttcaaatatacacccacccttccctaatggtaatgtgtgagtacttagaaaagtttttaaatgttagatataaaagtaaggcacagtggttgctaatggcacttcttgaaaatctgcgctgctggtggacttctgaaagtggtgcttataaactaaggctggagaagactgacttgtaaaattcagataaaatgaaaatgggaaaaacttatcaaagggccccggtctcctaagtgccctgatgttgagtaaaggccaaatgccccagttttacttactcagatctgctttctgtgattaagaagagatgcacactagagagaggcactttgaaaaacacagcccaggcaaaattcttaaaaagactggctctggtggcggggcgggtggtgaaggactcagggacaccgtgcatgcagcattgagggagttaatgcagacttgctagcagacagcttggaacgttctgggataggccctgcctgaagaacatgcagtgtggttagccatcaagttcccatgtgcagaagtgccttgctcagcaggggcaaaatcagcacgtctgtggcaacagcaacaatgaataatatatgatgttaaatcccaggggttccgcagtctccactgaggtcttatcaaattaaagcttcaaggggattcatatgaacatcccaggagactcaaggactcagtcgcttttcagagggtgggcagccaatgctagggaccagacagtaggcttttttctttggtttcttaccggaagcacactagggcggggctctgcagtgggttttccagaatgcagagaagctgggagcccctctcagcacttggtcagcctcttaggggactgagaactgtaacaactcctaccctttaaaacattgacgaggtcagggtgtttgacagcctaaccaggcaaagaaaatatctgtgcaaggctagcattcttccagagctctggacagtaatcgtatgccagattttccatgcagtggactctagctgcaggaactatatggcaaggctggagtccaaggaacccatgattaaattctgttttcctgcagtaagtggaacacagagattattgccacagcaacactttgggtgcctgtctgtttgagggcctcagctgagggcaggcatctggttttgcttatgtcctgcggaggctgaagagagggtgggaagccctttagacagtgaatactgtgaaatagtgaagagatgggaagggtcgtttgaatccctgactgctgtccttaaaaaaaatggatacgtcttcttagctaaataatagcctttttctctcacccttttcatgatagtaagcaagctaaaactttaaccctttgtaacaagtggttgcttgaagacatgactaaacaggctagcataaattcagcccaaaaaaagtctgagttaagaaaactaaattctattaaagaggtgtctgtttttcacacccctggggacagggtttgatcatcaccacatcatgaaactgcctggattttgctcttcacattttttgtgacatccagacacagccagggtgactcccaggattcctgtggttgtgtctgttggcaacagaagcattatttggtcaagggatgaaatttacaggaaccccaagtaaatgtgcaaaagcctgcccctaatagagacctcacttaaccctaccactgtggtcaccgggctgctctgtgaggtcagaacacctcaggtgagactgtggagtaaccagatgccctggttttcctgggtttcaggggttttccaggacaaaggtcattctttgctaagcccagaatgatccccaggatagttaatcaccgtaagaaggcacagataaaaacttttttctgtgagctactacttacatttcaccaaattcaagactgacaaaaaaactacgttgtgtgaaagctcagttacatgtgcccatcatttttatttcttatgctagggcatgaagggaagctcaggagatcctgtttcatgaggctacagtctaaatctcatctaattctagtcagtctccaaaaagctgaacactctcctcttgtctccttgtaatcaattcattgtcatcagaaatgtgtgacacctcgaggggaggggaggacgtgtcttgaaaactgatcagagaaattgtcctgaaaatgatgctgtaaaatggaaatgagacctttagaaagagagatgctgaacatgagaaatcagtaagcctcaagacaaaaaccagaggaaatggagagagatgggaggcaggaagccggacctcgggggacgcagcaggtcagtgtcccaggaccagaggtggaaatggtcttccagcctttggtgggatgaaactgagcctcacagacccaggcccctttgggtgagtttattctccccagaattaaaagaggaggaagtctgcgagcttcagaagtccccctagggttcttgtaaaggcctccagtgcagtgctaatgctggtggtactagctatggaaagctgacatttggacaagggaccatcttgactgtccatccaagtaagtgtaacaagacacagcagtatactggaaattctggaatgtcaccccagtgtcaggttttaaagaaccagatattgcttaaagttaagtggtgtcctctgaggtcctttctcttctttaacctcaatattcacagattttcttttggaccctgagttgttaggtctgtctccctgctgcgtgtacagctgaccttgaccctggaaagtcagaatctttcctgctttcagtgtcttctctggaggtgatgccctaacttttttgagggggaggtcatcctttccaaatgactcccctgagtaacctgttctaatgtttagtagcattccctgtcagaagtccttccttacctcaatcttaaattattcttggtatagccgaggccgtttccaccagcatcatccacaataaagaggaaaattgagagcggagtttgaataggtatgtggtatttggttcagaatgggttttaaatgaaagtggagagggaaaaaatgaaacctgaatgggaatctgaggtcttatttcaaatccctctctgtttcctgtctgtcatctccttttgcttctatagatgcaaaactacagagagagaggcggggagagaaaggatagacagaaataaacatccactgtgtccattccctgtcactgaaaccaccaggcaagggattacaattaattccaaagagtttcagatacacggcttaatacctttctccttgtggtgacttgtatcctggctgataattagagcagatagaaagatttggctttggtgtgtttgccgctgcaccccgctgggaagagacagaaacttgactgttttttaagattcataaagttccttctgtcagtcgtcgtaaaactccctgaagcagggagatgcgtgacagctatgagaagctgatatttggaaaggagacatgactaactgtgaagccaagcaagctggaaagacctaaactcacagtgttccttatgtacttttgctcccttccccgtttcaggccttttggctgtttcctgtagggattctaagagagtcaaatggaaatggattgaagagagtctgaagccccgtgggtgctcagaaatgataaatgaaaggaataagagacagaaagggaaacaaagttgaaaagcaggaatatgtctttcactgcagcttgataagactgagatgtgaggtgggtgtcagagaagggcatgatcgctccagctgctattgcagaacactctgttttcctaggatctctatcaagggcagtgtcctcttatgccaaagggatgagtcaagtccctatatttctggagtagctgcccttgtgcaggcatagttggtcaggcagacagcacaatcccagctcagtgtgtatggaggaggccacctgacattgccagctgtatctgctccattcagtggcagcataaatccataccaggtgggtgtggatttggaatatgccagtgccactacaaggctgaatgttgagttgttgtgatcatcttgaatgtgtgagatgcctccaagtgaagtctggttctaatgagcagggtgcaggttggaccaatattgcccattttctgttgagtttctccaagcccagtagtgtgggagccaacattgagagactgacatttgagctagggatcctattgactgaaatatgccaaagggatctgaaaggtcaaaactgccttcagagctcagcctttgttgttatctctctggcagttgtcatttcagcaaaatgcatccacttagaaagctcagctcttcattaggcagacaaatgagaacaacatattgaccagagataaggagttgggagcccagatctcagcctctgagagcctggcatttccagttctttaatcacgtgagccagtgagcatatgctatctcagagaaagcagatcaatggtgcctgaggacctggtgtcaccaagctagggcttagagacagaaatgagatgcagatggggatgttgtgtgaattggggaataatagagaagtgaggaggagacagggagttcaatgatgctttttaaaaccagcagcatgtgagaaattgtaatgacacaaaggtgaagaagtatgtattgcatataatcctagcaagtttcctaccattcccaacagaatctagcctcactgtggctccaactcacagatcctataggtaatgctgaatcgtacctgagatgccttttgaagtggcatcaagactgggctctaaaatctttaagagtcacctgtcagttattgtaaaggtttggatggctgtgtgaaaacctcctacgacaaggtgatatttgggccagggacaagcttatcagtcattccaagtaagtgtccctggggtgctgcctgtggagtgcgctggggctaacagtctcatacattagggcttaaatgactgtgcagatggcatcgtggttgaggacacaaaactgagagaatcgagatacattgactctgatcagaaaaaaaggtcacggaatagcaaacataggtttagtccttaaaaggtagcatagataacatgggacttgaacgtggcaatttgaaaaacaacctgtggtctatcagcacgttctcactgcacacgggggataaacaggggtgggggaataagcaatggacattgcatgataggggtgctagggaaatgaggcaggtcaggaagaaggaaggtgatcagagcctcatacggagttaatctagagaagatgaattgttccataagtttcacaaagaaataaagtccaaagatataataagaagtcctgattaaaatccacttcagaatcatatgatcatcaggagagaaattaagtcttaaaagaaaaagaagtttttaaatgtaggtccataaaacaaatggacctacacctttaattagacagcaagcagcacaagatgcacgttagccttccttttaatcccctctcaggaggaatcagtctctccagctgcacatggtcacagctgctctaagccctggagctccttcccagtaatacccttgctcctgtgcctgcacagggaaaggagatgcctgcctgcctgcctgcctgcctgcctaccggtctgccttttggtccgccgcttggtggggccccaggtgtaacctctggctgtctcttctgcctggtttttgttgagcttcctatcacagtggaacaccggtaaccagttctattttgggacagggacaagtttgacggtcattccaagtaagtcaaagaaaattttccatcaccattgtgttgagcaaaccctttaaactgcagaaagagctgtcaaagtctgctactctatttctctgcttctaggtataactttatctggaccagagtaaagaggcccccgacccaccccgagaatgatttatgcttggacaggtctttatttcattccttgaactatctatctgtctatctatctatccagctatctatgtatctatctatctatcatctatctcagaaatagttgtttttaacagttgattctgtgcctcacccaaattgtcattaactaaatgcagatgtgctgccacactgataaacttcattggaaaaaaagaaaaaaccaaacccagagaatgttccttgaacattcctgaagtgggggggcaggcgatgtcacttgcagtgacagctggcctctctagctcacccccacatctgtgccaaccagagaagctgggccctttgtagcacaagcctcaggagcagagaatggagggacattctcaactgagaggagagggactaggaggctagatgggaaatgaggtgactctacagaaaatcgaatatgggatggtataaaaggatgagaaagatggcagggggtccacgatcgctcttgtatttagacctgggggatgcactgatagataccacctggagagagaaagaggatttctgtttccctctgaagaaaaatgtggcagaaaaatcaaaacagatcgcacatgtcaagcctctcctaattacagcctttcattctggtttctctcagctgttccagcaggaaatggtaggaaagggtcattggtgcctttgatgttgtggaagcattgcaggaaggagatttgcaagaaacggggcaggggcttgcagtagagtctggagagtttagaatgatggtttttgcaatgacttagaacactgtgtatctaactttggaaatgagaaattaacctttgggactggaacaagactcaccatcatacccagtaagttcttcatccttggtcaggaaatcagcctgcataagattctggggatcatagtagacatgcaggcttagagaattttcatctgtccttgttcataactggtagagacaggtggcagccaaatatctgagttttccgggggaactccagtcctgactatttaattcaaaactagaaaatatgattcacaattctgtttttgctgctgccgtcaagtgctaatgtggcatgtgaagagaattcaggcagaatgactgcatcttcactttcatcttgtgtgataattttagctttgagtactgcaagtgtttgggagaaatggtagaaacatagaatatcaaagagacaagcaaaccaagagacccagagaggcaggcagacggaacgtcaggcagtataattttacaaaactaattcagtgttgtgtctctctctgcaaatggcaaggtatcgggaaaggtgctaagagctagtgctccgggtggggcaggattatctaaatagaaaactaagcactgatctcagggggaaagtttaaacttggaaatctctgggtttggttttttgtttttttccaatgaagtttatcagtgtggcagcacatctgcatttaattaatgacaatttgggtgaggcacagaattaactgttaaaaacaactatttctatgcagccataaaaaatgatgagttcatgtcctttgtagggacatggatgaaactagaaatcatcattctcagtaaactatcgcaagaacaaaaaaccaaacaccgcatattctcactcataggtgggaattgaacaatgagatcacatggacacaggaaggggaacatcacactctggggactgttgcggggtggggggagtggggagggatagcattgggagatatacctaatgctaaatgacgagttagtgggtgcagcacaccagcatggcacatgtatacatatgtaactaacctgcacaatgtgcataagtaccctaaaacttaaagtataataataaaaaaaaacaactatttctgagatagataaatgatagagagagggagatactggatatatatacacagttaatgacaatttgggtgaggcacggaattaactgttaaaaacaacatttctgagatagagagaaagagagagatactggatatatatacacagggtagaagaatgtagagagaaacatgggcaaatatattcttttgcacctacaattaaaagctgtggaaaatttgaatatgttcactttgtaaccaaagacaaccacacaaaatggaacggaaagcatgcttgcaacagcgagaactggaagtatggaacctttctgtcttaaccactcagttgcctagaagaatcttttttctattttgctgcattagaaattaaaggcatgagtattgaggatttgggtaggtcagacttttatagtgacaatcacattacaaagcacctcttagctaggttggataaagcacctttaaacatcaaagtctttttcttctttctggatgagatagaaaaatggtctctcctcactctgtatctaaggacagggggctcagagagttccagacttacaaagtgagactgcagcagagctgagccatgggacctggagggacccagtgacggttagtctgctccctcccacgggtgctatagtagccacaaccgttcaggaaaccgtccccaggtgagaacgtaacacacgcagggaaaatcccactgctactaagagcaactcagcataagaatgcattacccagcaagggacagtcagaggggctctaaaccagagccccaaatatttgaaaactttatgtggaagccagctataacaagttcgttttccaagccgtgcttccagaagctgttagtggttggtagttgctaagggttttgaaactggaggacatcatagcagagtggaattatttggcacaaggggctatgattagaattaatgagatgaaagaaaattctggctagaagactagaaaaatccggaaagaaaagatacagtaaaccttgggggagttgtagcatttatcctagtccaagcagcaaagagcagacagaagccaaattccaataaacaattggcctttttacttttacaagtttctgcaattatcacaatgtcttcagcttcttgggcaaatatcaacaggtcctaaatgcaaagtggaacagtcctctgtttccagaaccgagtagcttagccccgccccacacaccacccatgctcaaccactgtttttgtagaggagtttgacgctgtgtggaatatggaaacaaactggtctttggcgcaggaaccattctgagagtcaagtcctgtgagtataaaacacactcaagtcccaacctgggtttcattgcatattaaataaactttttctggctgggaagtatttgattctaaagaaaggaaaagtgaaattccaagcgcaacgcaagcatttcattagtgtgattcattaagaatttccatgggttgccttcgagagcgttaatcacatccattcactggtgagacccacagtttgaaaattgagttaaatttgaaaaaaaattgtcaccatctctgtagaccacagtgcttgctgtttgggtgtctagacttccaaaatggaacctcaatctgtagtttcgagcttggagatttatcccgagcccgtgacttagagatgtgtaagaaaagctgcacactgctgggccttgtagggcatttgtgggatcagtgtcatgaaatagcctgggtagacaggttggtgaggagacactggtgacaggtgtctgccctgtttctgtaaagctgctgacagccgtgagaagaaaagcagcggagacaagctgacttttgggaccgggactcgtttagcagttaggcccagtaagtctgagcagaaagtaagatatttatgccttttcctattatttgttctagcctgacatttgagttgtcctcctttggattccagatcaacaaaccatagtgtcttttcatactccttttaatatttgtggctaagggccctccgttcttcccatctgtcctacatgagggtcctgtggccaggtccacattcataaagaagccaacagtgatgcagttggttggcagtgtgtcaagaaactgcagtcatcatctccagggcccttactctggttatgtgtgtttcaagcttttatgccagcaacagaggagagggagaagtgaccagtagcaatgaccagggctattagctgtacctggtgtctgtgggtttcagagcagctgtggaggttacgggaggttcagggcatgagtttttctggcagaggagtttatgtaaagggttggcccagagtgtgtattcaggaggaggtgctgacggactcacctttggcaaagggactcatctaatcatccagccctgtaagtgcttttgcctgggaggtggggttcaaaatgcagtcctcatggggacatttctaaaccttggctcatgtgcttctggtgccactaccatttttggcactatcctacttacatgggaggttttgagccatgtagacaaggaggtgatgcagtttgtgctttggaggactcctgagatctgccctttggcaactgtgtttgagtaggagtccctcattggaaaatctggatgccagcagacaaaagatatgagcttaggatgggtcacaaacaaatggaggccactttgccagcagcacctttgcaacgaaaattgctttcataggaaatgtggaaatggctgtgtagatagagatttggccatttctccttttctgtctttataccctcttctctgcctgacttagggaccttaaattagagcagttattaatcatttgatttctcggccccatcactcatcaagtatgacaagagggattcattaagataaaacccagaaacagaaaggacaaagaattcaattctcaatgtcttcagagttgaacttgacaactcctcagccttaaccatctagtcagcaccccatgaccaactgaggtcaaagagggcaaccagcaggtaatgttagtcaagtgagtatctggccagagccagctgccctcataggaattaatactgtggagtttgggaaagggaaatgcatctgtgagggctcacccaggctgcccatctgggagagatcatggggagagttctgagtgagggagtgaacaccagatggaaagtcaagcaacaggtttctgttatgaagcatctcacagtgtaaataccggcactgccagtaaactcacctttgggactggaacaagacttcaggtcacgctcggtaggtaacagaaaccgtgaggtaacttaactgtgtgttcctttaaaacaggggatactgcagaggggatatcctggctggatgtagtccttccttccttccagtgggaggtgatctcactgaggacacatacctgcattcagtcagttcttgtgctatttttatacctgttacggaggctttcctttccacctgtgaaaacagaacctctctgctccaagcttcttcagtctttattaccctatgtatttcctttagaacagtggtttgggaattaatttatcatcaggactttgtctctgatgatatcactctgggcaacaaaatgaaagggctctcaaatagagaacagagagtcctgaatactcggataacttctccagagtgatatgtgttatgcgtaatgggatgaagtgggctagaatgaccttccaatgactgttttggagacacactaaggaaacttgcttaacatcctatatccttaacttgttagaacattggtgaagtaaagcaaaatcttgaccctctaagaacataaacaaatgccaactcctctcccccaaagcactgccatgtttcattatgtgcaattatgaaacaaatacatgataatttatatgaaattacatagatgagtagtttgagtattttgacccatgagtaagatgcaaattgtagaagttctcaggtagttcttcataaaaagttgtccctgaagacaaatagtgtacctgggcataatttgtttgcagtgttggtttatgcaccatttgggacctgtttgaaagctgattatgtcccagtgtgccaatttggggtctcaattaactgtgctcagtgccatgataagtgcccatatttacagtctagaagcatgacaaaatgaccccatttctgtaggaaaaggagaatggaactgtgtgtggcgtggtacttgtcagtgctgctcccccttgtccctgccatgctggaggtggctgcaagttttccccaggaggtttttgttagagcatgtattactgtgacaataacaatgacatgcgctttggagcagggaccagactgacagtaaaaccaagtaagttgggggaatgggtcaatcttaaaagctgacctgagtgagcaatggtgctgttctgggcagtttctgtggggttaagacactgccactcccaagaggatctaagtacctggtttctttgtgcctgagaccctgagctggttggaagtctgttagttgatgaattcctggcaatcttaaggattaggtcaacgaagaagtagaaaatttcactggtttcttcattggcttggctctggatatataaaaatgctaaatataagccgggtgcggtagctcactcctgtaatcccagcactttgggaggccgaggcgggaagatcatgaggtcaagagatgcagaccatcctggccaacatggtgaaaccccatctctactaaaaatacaaaaaattagctgggcatggtggcatgcgccggtagtcccagctactcaggaggctgaggcaggagaatcgcttgaacccggaaggcggaggttgccgtgggccgagatcgtgccactgcactccagcctggcgacagagcgagactacatctcaaaaaaagaaagaaaaagaaatatggctgagaaagtggcatggtgctcctggtccctaaagtagcccctgggacctcaatgttgacctcctgtgctgggtgggatgtttctgcccaaccttgctattgtgcctctggcacaagcattctgtcagaacccagtgtcctaggaacaaaacaggggatttacgatcaagttcagatctatctgcacagccagctgttaattttagagaactgtcctgaccttgcaaaggaactggaaacagaggctgcaaggtggggagacttccactagaggggaaggtgatctcacttgctcagccttcccctccatccttcccacctgttgattattgtaaagccccataggactgtgtgaattatggaggaagccaaggaaatctcatctttggaaaaggcactaaactctctgttaaaccaagtaagtgttggggattcaaagtcctgatttatcatcagtactttgtcactctgggcaacagaatgaaagggctctcaaatagagaacagagagtcctgaatactcagataacttttccagagtgatatgtgttatgtgtaatgggatgaagtgggctagaatgaccttccaatgactgttttggagacacactaaggaaacttgcttaacatcctatacccttaacttgttagaacattggtgaagtgaaaacaaaagcagtaagtgcaactaaagtgcaatgcagagtgagtgagaagagacttaccaactcctttctctgtgatatcttccccccaccttcacccttgaaccccacagaattgtttctgtccatgcccctggctgttcccagtccagaccagcacgtcgttctgctggacataggaaaactccagacttcataacatgtcacagggccccctccctcagatggcagatctcaatattgatcacccacatcactgtggggagtggtgaccttgtcagcaatggtctcatggaagagggaagctttatttacaccatcaagggcccatggatgacccacagtctgtgtgactgctgtgtgattggttttcagacattagctttaataggaatcataggagaagggacatggtggctactgcaaggggttttttgtttagggagaacgcactgtggaactcaaattccgggtatgcactcaacttcggcaaaggcacctcgctgttggtcacaccccgtgagtttttgtggtttactaattgtcctctctggaaagaaatccaatgggacctgttgaaacacagctgaatttaattgctatgcttagcatgcagttgttaactatgtctgatgtgtgagcaagatatgaatacatgtttccctggaggctggatttggttatcaggtctcggggcagtttgataaattgtactaatgctgcaatcactgtttttcaaaggtccacaaagcacgttatggctttgggaaaggcagagataagaagcaaagctttgtgatagagacagaaacaaggccatgaaaagggaagctaccaaagcaatggcatagccaaggaagtgtgtcctcaacagataagtggcaaggaccctgttgagttgatgcttgtgttgtctggtagaattaaaaaataagatgagtgggctgggcgcagtggctcatgcctgtaattctatcactttgggaggctgaggcaggtggatagcttgaggtcaagagttcaagaccagcctgatcaacataatgaaaccccatctctactaaaaatacaaaaattagccgggcgtggtggcgggcacctgtaattccagctacttgggaagctaaggcaagagaatcgcttgaacccgggagcagagattgcagtgagcctagatcgtggcactgcattccagcctgggtgatagagcgagactccgtctcaaaaacaaaaagaaagaaaaacagaaaaataaggcgagtggactgaggactccagtgaagggagggcagcaggagttccaagcttggcatggctttcttccctatcgagatagcagaacaatgtaactttctctagagagagaacagagcccttgatttatcacatcaatgcttctgtttaggtagcccccttcctcaccgtagggacaaagcaggcccccacatggacttcacccccttaactaggctggccaagccaaccctatgggagaggcagagaatcccaggactgcagagggcctccccatgtccactagattatctgtaataaaacagaatatttatccaagttgtgaagctgtgagggagagggtaatcgtgatagattataaaaagcaatattgaaaattatacaagctgtctccacacttgcagaattcagtgtgttttttgttgttattgggtttttttctgttagaattacagaaacaggggtgctttcctgcaggcaccctgtttgcaaaaatgtctgccatctcacatttcagtagtatttcatcaacaatcttctgcacacgaaccagctgtgacaataaggtaatggggctgatttgttaacaaatcgagtttatacatttcaatgagtggcctagtcaaaacactcagcttgaagcatccaacactgtccattgctttccccctccctgaaaccaccctcaaaggccaaaacactttctttttgtagcatccatgatggctttatcttttaaaggtggattttactcttgataatcaaaatcctttcagaaccaaggctattaaatagaggagagaatcgactagttactgatactgttttggatccaaaaatagatgtaactataaaataatgtcatgggtttgtttatgtggctcataaactggctctcggggggaatcctagatggaatatttcagagggttcaacagtcatttagatgcttaagtcctcatatgttcactaaatcagactctttaattaataaacatgcataaagatagcatgagattgaagaacttttgcaaactcggacccaatagaagcagtgaagactttctgtatgaattaagatataatccgaaataaattacttgtagaaaaatacgaggtcaaggcctttcaatggggaaagtgcatgtaatgccccttttattcatggagagtaaagctgcttccataaatggtaacattatgttggtttatgtagagacacataacactgtgactacctcaggaacctacaaatacatctttggaacaggcaccaggctgaaggttttagcaagtgagtattacagacaagacaggctgtattttaaaggttgttggtgttcatgtttgagggacaagggaaggtaggacaagggaaatacccatgtaaactgtgcaagctaaaatcactgctatctgaagcggcaattctgggtccctctactctggacaggaggggcgaaggagagctctgaggcttaccatgatggacttactgccgatttcataagaattgtatccatcattagcaaaatgtttatgacttgaaggcctcaagaaactcctgttaacacaacaggagttctgtgttctttattcttttaaaactatattctcactttacatttttcactcatttttctgcctttttttatgcgtctctcctctgtgcaactcaatgcttcatctgggcattcatattttgagaaatcatctcaagaggaaatcatgtccagatcctagcatgtcactcaaagctctctgaaatctgggccctttctattctccaaatttattcccactgattccctttcatgaatgctctgctccaggaaaactaggtatctccctcccttgaatatttacacatgcccacacctgtaccctgtgtccatacatcagacatcctggacccaccacctaaaacaggcttgcacaggtgacaaaatttggcctcatcatctctcagccttgagacccagcacaggcatcaccagatttagtttcataggaagagcatgaaaaatcatatcattttttaattaagcaggccaaggtaagagatccatcagacaaagaagcaaagtaggaaggagagagatggcttctgtaatgggtttgcaaaggagagctctgtccctgaaatagcactaatataatccaagtaggagatttacaggctgcatgtttcttggtttccctttggagtgctccattcctaacaccagttgttaagcccctggtcctgaatgtggccgggggtgaggaagtgggaggagaccatgctggccactcagtggtggtgcccatggagtttcgggctcagattttctgtgagatacctcaaaattgagagaagctcaaaaggatcatgcagcaaaaatgggagaagtcaccttcttagtcataagaggattatttctgattagtccttgagctgtgttatgtcctggggaagggacagtaagagtagaaaagtctctcctaggacaaggataggaagtggtgaaaagtccttttcctggtgactagcaaagcaggggatgaaaagatctggagttggagtccagggtggattccagggcagacaactgcataggactgtctcgagttctgtggattgaaaaggttgggcatcccttcagatgttcctgagctgacctcagtcagaggtgcgtggctccagcacccagaaggtgttgaccagcacaccaacccctcctcccaggtgggccgtgacagcttccctcaatccctcccactctgacaacagtctctctgattgcttttgctttggtgctctggacataaactgttactactttgtccaagtgaggtatataattttcagaacgctggagaattattatctaaaacaccagtggatacgctacaattttggcattcagtattctgggcttgtgcaggaaaactctttctttagaacatgtagaaagactatcctttagttatccagtgtggaaacagtcctgaaatccaaactgatactgcgatcctgtgccaggttattactgtgacaattacttaatattctctgtgctcacgatatcactccttccagaagatctttagggaaaacttagttcagtttctaggaggtttttgctcagccgaagatcactgtgtgaataataatgcaggcaacatgctcacctttggagggggaacaaggttaatggtcaaaccccgtgagtatctctgctgaatccataatgaatgctctaatttcaaaaggaagccgtagcactgagctctgttttctgttttctctacttaattttatcttttatattaattctaatggttacatgttatcgatacatggcatatgtatatatgaaaatggacatacatgtaactgtctggcgtgggaacaaatgtgctggagaaaaacagatttcttgtcctttttgtcttaaccatttgggtcagaaggtctgactgagtagaacatgggctgggtgagcactgcagtgggggaatccttctccagcagctttgtcagaattatgctctttgctggcctggtcagaaggcagctttgtcaggaggtggaaggatgaactagttaacctcagaagagcctttccactccgaccatgctgggaatagaccgccataataaacagtcttttccgctgcctctttagccaacgtcccagctggaggagcacgccggccagatttggggattgaaagggatttcctgatacacattggcctggtcggttttggtaaagctttctatgactgtgtaatgctggcaacaaccgtaagctgatttggggattgggaacaagcctggcagtaaatccgagtgagtcttcgtgttaactctgtcaaacctgtctgtgcagtttgaaatatctcagaaactgcctccttcttttttagccctgaggtttaagatatctagttatggctagtgttttcttcctgtccaccaaagctgaacccttgcctacccctcaatcaaaataactagatagagggatccatatgagcagggtaggaaggccattggagtgttcagctgttttcttagagagcaaatacattcgtgcattccaaaaaggcctgtgtgggagcactgaatattacagaaggtgagtgtgtagcacatttcatggccgctttagtctgcactatgccaacctcaccgtgggccattggtaaatactgttgctttctggccaaagacaggtcaagtgctgggaactctcgggactcacagtcacgctagtgacgtgctagagcacatctccccactgtggattatccagaatgactcaaacttgcgatataactcctgcatctctcagttctctttggcttagagccttattgtggatttgctagaggtaacaggaaaggaactgatttcatcctaattctagcctcttctgagaagttattctctgcaagagtcttcagggagcatcttacagaccacctacactattcagaattttgttccgcacaccacattgtgttcccagcagtgtttgctgtggcttttgctggggccaggtcctgagtcagttctggagctccaggcttggcaaagctggataagggcaaggggagttgtacagcagaaccaaagggcttcaggaaagacatctttgatatagacattaatgaatttctaaatgggcttctatatgctaacctgataagactctctggggagaaggtcatgctttcctttgcagctctaaatataagacacatgcagaaaaaaaaaaaagaatgggaaatgtctgttacagtgccaaaatgaagataatcagtataaatattagatttgtcttaatattaagtttatgaaatgtaagtctttcagaagaactatctcaggatatatttattaggtcaatgaaatattttatccatgtgactggtatacacacttcaaaggagaacccaaaatggcaggcaggggagggtggctaatgaaaggtatggcatagtagttaagaatatgaattttggaataaaactgtttgggtaaatcctaattcagaaggttacttaatctctttatgcctcttttttctcatctgtaaaatggggatggtaatagtacctagctcactgagatgttacgagatttaaagagctaatacctataatggactttgcataatggcagcccgattaaaagttttcagttaatatgtttttattgctactatgtcaggttgctggagggaaggaagaaaaatggaaatgatccccatttatagtttttgtaaagtacagcattagagtgtggctctggcaacacaggcaaactaatctttgggcaagggacaactttacaagtaaaaccaggtaggtctggatgtttccaagtgaagtgcagttatccactctgttcattttttgtttaatcttctctgtctcaacttctaaccaaaaactcttactcttaggttatattttccttttataaaagtaagtagaatgtgtgtaaagtctggttgatatgatcctttctaactcacttggtttcagctagtggcaaaaagaagggtgtattggatctggaattcttaggttaaggctgagagaatgtgagtttggctgacttggaagaaataaaaacatcaaatgtgggtggttcacacaaaagaaggtgatttttcataataatatactaaagtagaatccacccttgtgaccaccagaattattcaagtacagtcttccaaggacaaaatgggtagcatggaaatgatatgtttttttggggggaaaaaacatggggagagagagagaaaggggactattagttgtctggattgttaggaaacatggaagacagcacttcttgttgtaaggtttggcaaaggttatcaccaagtagaagtccaaatgtgtgtaacatacccctggcaaacgttatagaagaaggaagctggggccgggcacggtggctcacgcctgtaatcccagcactttgggaggccgaggcgggtggatcacgaggtcaggagttcgagaccatcctggctaacacagtgaaaccccgtctctactaaaaaaaaatacaaaaaattagccaggcgtggcgggcgcctgtagtcccaactactacagaggctgaggcaggagaatggcgtgaacctgggaggtggagtttgtgccactgctgagatcgcgccactgcactccagcgtgcgcgacagagtgagactccatctcaaaaaaagaagaaggaagctgggagcagtgtctctcacctgtaatctcagcattttggaaggctgaggcaggaggatcacttgaggccaggagttcaagaccaccctgggcaacacagtgagacccccatctctacaaaaaataaataaataaaatttttttaaaaatagccaggcatggtagcatgcacctgtcatcctagctactgaagaggttgaggcaggaggatcacttgtgcccaggaggtcaaggttacagtgagccaagaacacaccactgcactccagcctggacaacaaagtaagatcctgtctctaaaaatatatatttaaaaatataaaataaataagttaaagaaggaggaaggagatgaagaaaatttggcttagtaggaaagtgtttttgtactgggcagaaacactgtgtcaaactggggcaaacaacctcttctttgggactggaacgagactcaccgttattccctgtaagtccttacctcttgacaaaaaagctcttagtctgtaatgacaagttctcacatcccagacacctaatgaatttctaaatgagcttccatgtgttaaactgataaaactctctagggagaaggtcacccttacctttgcggctctaaatgtaagacatgttgtaagaaaaattgggaactgttaattgcagtgccaaaatgaagacagtgattacaaatattgggctagttttaatgttagatttataaaatataagcctttccaaagaaccatctcagggtgcatttattagtttgtgtctatacagcccaattgtccagttactttgattaatgttggtagctgatgcagatatttagggacttccttgagaaaacttctttgtgctcaaaattgcatgaattgaatggcacattacctaaataattgccaaatctgtttcactttgtgctgtatagactcagcctaataaaaacaaatgctgttgtgctttttcccagtctgtctcctctccacacagaaagtttccctttctactaaacagcatctcttcacacgaagaaaagatgcccagcaagccatttgacttattgctgctgctagtttgcatttatatgactcctttccttagaagggatgaagacactttatacgacttattagctaaacagattgacagcctaattaggaagagagaaacagatctgagtatctttttgtggctgctgttcctaccccctcgtgtagaacatttggtcagatggctctttgagacagaaataagacagggacgtggtctctgcttgtagtgtgggacgtctcagctgcacctaagaggttgtcacaggagtactaaataggtcagggcaactgacacagccaggaaaaatttctttcccctagaacttgtgtgtgctcaccaagcaaagcgtgactaatttgacatccattgttagtgtgtgtctacccttcttgcctttgttttcagacccttcctctctagatcctattccttccatctccaactcctgtatgtaaatccctgctctctcctttgaattcctgactgctatgcccatgcccagcaccggcacccccacgcacactgctgcctgcctctgtaaccatcagctgtatttctgaggactttcctagctccttgagtgatcctcaaatggctcagggcctgagggaatctttgctgagggttggccccagcagagccgctgcagaggtagaggtggccagcaagggacacagactgcctgcatgaaggctggagctgggcccaggatgaggaaaagcctcaggaaggaagggctgacacgaaataaggaataccatggcattcatgagatgtgcgtctgaatcctctctcttgcctgagaagctttagcttccaccttgagacacaaaacatgtggttatgaagagatgacaaggtttttgtaaaagaatgagccattgtggataggctttgggaatgtgctgcattgcgggtccggcactcaagtgattgttttaccacgtaagtatatcttttctcatttctgtgggctgttatgtccgtaaatcatatagaacagttcttcttatgcacacacacacacacacacccattttccagtcactgaggagaaacagtctctgggtctacctacacagccagtttgaccattaagatggtcaaattcatttttcaagataattttaactggttccatttaatgctgccaacagccaagggcattagcatgtcgtgggaacctaatctatgttcactcactgctgtgggaggacagtcatttcttcttctcccctggcagtcagacttcagaatccagctgaccttttccatgcctgtctcttctggcagattaagtggttatttccactaactttcttgtggaaaaacacacaagacagatatattctccttcagtttttactaagaaagttttgtggttatcattttgacaataaacttcagctagcatagtccctactattcatgttaataatatcttgacttgaaccatcatattttccccacatcattcacaatgcatttcaatgctgtaacccactgcaccatccccagcccttttatcttcacaacgttctctaataaggtaaacaggatcatacatcatcaaacatatgtcacagacagaaaagctgacacacagacaagttaaataatttaagtcaaaccaaaaaaaaatcataactgggattagagcttgagattccctattttcttacagtgaagtgtcttgagctgtcacttaatgcattgaaaacataataagcacaggccataggcattttcagaacatgaaacttgactgaaacaaaaactgactgtttgattgctttggtgttttaaatgtatccccaaatctcctttgctattgatagtcatttggtgccagtgacagggaagagcagaggggcttaggaggtttttgtagatctcagtatcactgtgtcttataacaccgacaagctcatctttgggactgggaccagattacaagtctttccaagtaagtactagaaaccaaggagccattttgaaaaggtgttttctttttctttttcttttttttttaaatgaagttttgctccttgttgcgcaggctggagtgcagtggcatgatctcggctcactacaacctccacctcccgggttcaagcgattctcctgtctcagcctcccgagtagctgggattacaggcacctgccaccacgcctggctaatttttgtatttttagtagaaacagtgtttcaccatgttggccaggctggtcttgaactcctgacctcaagtgatctgcctgcctcggcctgccaaagattacaggccactgcgcccagccttaaaaggtgttttctataaacaggaacgttctcacagcactgcaggccacccttaccaactccgagctctgtaggggcctttagcacctatagctgcagaaccttctataaaccaattaatctatatgtgaacaatttaacctatatgtgaacaccatggtgctgactaaaatcttatcagcagtgaaaagaaggcactagagcgtcagatgcattatgactctaaacaaatgatctgtttccctcttttgcatttttatttaaaatatcagggaaggtgaagcaagttcaacttctccaatttgaaaactgtttctgaattatgcttcccttgtatgcagagagacctagattgactttggatgtttagtcattcgatttaatcaaatgtaattaaatgagcaaataatctccaatagccaatattcctatgttgtttcattgttttatgtgctttgctctagactttttgtctgggctttgtctctaataggatccccggaaggacagtgaaggtttttgttaaggtttttgtgtctgtgtggatagcaactatcagttaatctggggcgctgggaccaagctaattataaagccaggtaagtctcagagatgtgactgcacgggagaggagacactagttgaataatgcacaaagtgtagcatgcagattatatttttaagaacaagtcagcctgctggagacaatgcactcaacccaaatggggtctccactcccagtgagaagcatgtcagccgctaactcttttgtttggtctagtagcttccggaatgaataatgcttaagtagccctctaagagagcagaccaggttgttagggaatatctaattccctctgatatggttaaaactctttgccaagggcagaaaccagcctcattccattggaagagcaaattcagagaaaaaggaaagggtcacacagccaaagacggtaaaatgttcaaaggtgaaaaatagccaagtctgcagctctcctgacatccttgctcaggctgctgtcccacgtggagagcagatgcctgcaaagctctcggtcacttgctggagtcactcagggttctgggccttgggatgtaacttaaatgacagtgtcagggcactgtcagaggaatatgaaggctgcagcgatgcctgcaagtcagcttttgctacactgggactgaggtgttctaagcctggaaagacacaaagctgtcctcatcccaacctgccgtgcccctccttgagggttagtgtaaggctctgaaggactgtgtgaattatggcggtgctacaaacaagctcatctttggaactggcactctgcttgctgtccagccaagtacgtaagtagtggcatgtgtcaggtggattctgtgtccatggcaagtaggaagcgacagcacccttaggtggaaaggatggctgaaggttgactttgttcactgctgtcatctcttatctgccgtgatatagcaggctgtcaaaattcccattctcctggatggcacaccacagtcaggggaggagaaacatgctaattttatgataaaccccaggggagaaaaagactactgtgggaaaatttagttgagaaaatcaaattgttctcaactaaatgctgcaggctttatgcttctgtgaacccagtttcccagttattcattgaccctgaacatacgtttacctgtgcaaatacaatctctcctaacctatttatacaattatgtgtctgccggtccaaatgccttcttctataggccatgtttttatttctcttccaaaagagactccagagccatccttgggaagagtgctgagaagtcaggcaggcctaactcccaggggtcagggaggggaaagagaaggctaagggtaacttagctcagtactagaactgtgatccacgtatctgtcactctatttcctacgtttgcttcccttttgttttctctagaataagttctttttgtttgctctggacacccactgctcccaggatgaaaggagagaaatgagatcagttttgaacacttcctcttgaaatataaagaatcaacaagttacagtcatgttggggacttcttctctctccaagcttaaatttctattacgtaagccttacttttaaccaagaaagttagtgacatggtatcactgtctgggatgctcacccctctctcttttctccagatactccgtgtatactaaagctcagccaatgctcagctttgtgataaaggagctgttgtgtgtctttatctctgcctttaggatacagtcttttttataacagaaaatgttcacttctcccatttatttcatggctggactctctaccccttcctggctgaaacagcatatgggtccatggtggaacttctttgggaaaaaaaaaaaaatagaactgtttgacttttgccactcttccctcatgaaatgttttttaggctatcaaataagcattattacacattgagaaggctttgaaaaaacttgatcactgagtctggaggtgagctgggatggctctgtagctggaaaatatccctgtgggtgtaggaatgtaccgtcccttcaaacttgtgtgtttagggctgagctcacacatacgacagcaagagttgttaacaaattagattcagctttggcagttttatgcctagaaatgcaaaagaattttaaaagctcataagtttggcatttttaaaggagacattgtttgctttatgttgcagagccaatttttcttcctatcataaaaggccagaaacacagagaaagcaaaaaaaaaaaaggaaaaaaaaaaaaacacaaggagagtctaactgccccctcaccacagtgctatgtgtttggtagggttttactatgggtttcagtaaaggcaggaagtgctgtgggaataacaatgccagactcatgtttggagatggaactcagctggtggtgaagcccagtaagtggccatgttttattgatatttgaccaaacaaataaatcccgtgaagttagtggagatttaatttaatatgtaaacaaatctacttcttgaaaaatgacttttgtgaatacatgaaacactcgtgattattgagactagagcaataatgataaataaaggcaaaatgagaccaccccaaatcacctttaacattgtgcttagccctctttcttctagagagatatggggccatgagctatttacagccgcagtatctcttaaactatgttctgcaatgacttgtgtgtttactctgattttagccacagaatttgttttccattctattaaaaatgagaatctatctcattttaaatgctactaatatttataaggtaccttctttgtctcttgtgcctgcatatatattcatttcaaaaagatctcataagaaacccaaacattgtcgcattttgacaaatgtccacatctagtcccgtaatgtcaaatttcactaaaaacacagcctgactatgcaaatgcagtggaagaaaaaaacaattcagaaatggattgacactcccaggtggctttataaacacctaaaaggaaatccagagtgaaataaaatggcaggtatgataacacgatttttttttaatgatcaattcctccatggggaataaaagtttttaaacttacctccttgaaaaggagggaaataggagttcaggagcctggcattcccaggtgtgctcctggggtgtctgtttctccacattgccattttggagacaataggacccatccaaatgtccaaccaaaaaactaatattaagaggctggagtcaccacattgactgtctgttattaaaccctataacaggttataattaagattatggaatgactaacccaaggagctttaaaataggatagcctagttttaaacggttcagccttgggaaatgctggaagacaaggaaatgagatagatgactccataggtttgttttacgtctggtgaacatatccatcccatgttaattttttttaacgactatgataaagagcttctttggggtcaggtagaacccaaaggaggaagagaaaatgggacttggttctttaagtgtcaaacaaggatccagccagggttgagggcaatggcataaggcttccctctcttggtggtgagagaccacatccatggactgtggaaggagaacattttctaaaagacggggatcccttgggctaaaatgaatgatgctcatgacccccagctagggcagggctataatgagtacagcaaacataaggcaaggtatcctcagaatttggtgacagggcaaattctagaacttaaggcttagagccagggtgaagggaagactctgtaatgcagttccttctcaggtggaaatccagatatgtgccctaagtgacctattcctgccccatttttgtttgggctctgaaaagtggattcctagctcagtggctgtctgccaggtatcttttgccttcagtaacagaattatgtttgatattggaaaggagtttgttgtattgttggctttataattcactctcagtgtcaaatgaggtcattcaacttcctctcgcacatttgcaataagcagcatgaaattcaagcagaacaactagaagacacagagaaagatggctgagctgataatgaggcctgtttattacaggagaagagacaatataggaatctgttaagtcccatgaggttgaaatatccaccaaaaaatatgcagctgtcccccaaaaaaaagtcactaggagtttttgttatggtcccaatcacagtgtgaacagagatgacaagatcatctttggaaaagggacacgacttcatattctccccagtaagtgctgtttatgtgattttctgacattaactcccactgagttcaaactgctgagagtgttcagtaggaaagtttctaagacatgtgggtggcctgtaggtcctgggctcttctcttgcagaggtccagtcctcagcctttccacagctgagccaaataccaaattctcccctccaggctggaaaagttgctaccagtcctctgctacccaaatataaattatttttttattgtttattaagaagagtaaaagaatcgtgacactttgtccagaacctattttccagtcttttcccccaggcttgtccctggtaacctctgtttggactcattgttaagcccagcgtgatttttggctccaactaaattgattttggaaatgactccagcatacctatgacccctctccttccaccctccataaaagatttatttttctttatttggcctctgctgagattcctggctttgatgccccaggatctctcatttcccttgttccagggataagtgagagatgactttttaaagagctactttcatcttagagacaacaaagagagtatgccagcaagagcaacatcttgcattgagccttctcactctatgccattttccaaatctttttctttatttaggataagtgaccactcctttttatttctagtacagcaaagagtacatcatgatgtcagaaacagggatttcctttggaatgtttttcacaggctaacaataagctagaagtctgcaagcaattcagaaatgcatccctgagctacaactccatgtatggaagctcatcagcagggtagacaggcaaagcagaaacattttaattatacccatactttgtagagattgggtgagaagtgggcaaatgcgtgctaaggaaaaacaaaaactatggttaagtggggagatttctagatggttctaacagggaagaagaccaacaagaggaaacttccaggaaaaccaccaaggccaggcattcagggtttttgttatggaggaaatcactgtgggaattcaggaaacacacctcttgtctttggaaagggcacaagactttctgtgattgcaagtaagtgtttctagccatccttgattttgatcagcaatggcttcttcccttgaattatttttcagtgtacctagaatgcttttgcccccaagaaaggtttggaaggagctgggtcattagcattgcgcaggaaaattacaggttattctgttataattcgaaagccaactggacagtcatgaatgcacacagatctgggccctgcattgcaccctggcctagttgcctccagcttgttctgatcgtaatcctggcccagtttcctcctctgatcccaggagacaaaagccctgggcagagaaccagactacttagcctgggggaagcacaaaaaggcttgtctgagatccataagccttttttttttttctttttcttttttttttttttttttttttgagacagagtctcgctctgtcgcccaggctggagtgcagtggtgcgatctcggctcactgcaagctccgcctcccgggttcacaccattctcctgcctcagcctccctagtagctgggactacaggtgctcaccaccacgtccggctaattttttgtatttttttttagtagagacagggtttcaccgtgttggccaggatgatctcgatctcccgacctcgtgatccacccgcctcagcctcccaaagtgctgggattacaggcgtgagccaccgtgcccagccccaaaagccatttttaaatacattgcaggtttctatttaatgttgttattcattttgatttgcccaagtaatacattaaaatttctcattgtaaaccattcaaattacagataaagtccaggcacggtggctcacacctgtaatcccagcactttagaaggctgaggtgggcaaatcacctgaggtcaggagtttgagaccagtctggccaacatgatgaaatcccatctctactaaaaatacgaaaagtagtcaatcgtggtggcaggcacctataatcccagctactcaggaggctgaggcaggataatcacttgaacccgggaggttgaggttgccatgagccgagatcgtgccactgcactccagcctgggtgacagagtgagactccatctcaaaaaaaaaaaaaaaattacagataaaaccagcattcaccttggccacttccttcagtatcagtttcctcctccccaaaagtgaccactgaaaccagcttggtgtgttgtgatgagtttctctgtggaatatgtttatgtgaaatcccatcttcaaccaggaaagcttgagagggaaagggctcagactgcagtttgcaggatttcaattagatataaggaacagttgattagatgtaagagctgttagcaaaggaaaaccttataaaaactaggagctcttaataactagacaggtctttggtcagacaacacactgactgaggacaggaggatggattcgatgacctctgaaagtccagccaggactctgaggactctgaggaatggtctgttccatagcctgcctctgtaatgcccttctctcttgcctattgtccggttgttacagtctgagcttttgtcagagctgctcctatgctgtgagtggtctgattttctcagcatctctggggtttttgcaaagaaaggaaactctgtgcatactctggggctgggagttaccaactcactttcgggaaggggaccaaactctcggtcataccaagtaagttcttctttctggctaattattcttcccgagaagcctgtcttccatcatgcagaagctgtcaaaacacaggtggtgttttctttgcttggtttgtgttgggtggttagtaatatcagttggaaaacaaggttattaatgcacatattccctggggcattgtattcggacatttaatatccatgtagtctctccctgtgaaaatatgtgaacctccacgaaaagaaaggtccaaggaaagtagcagggaaaaggcaggaattggatgaaaatagccaaagagcctgcaggaatataaacaaggcaggatcccaggagacagagcagtagccactttgagtgaatttcccaggaggtgctcctgccaaggcccataccttcaaggaaaattaaggcaaatagaattgggctggggagttgctacttattagtattcctcccacgttctaacctaattataaggaggttgttttggccatgggcagtcatctcaggttttgttttcctgctttcctccctaacctccacctgtcttcctagaggcctgagtcaaggttattgcaatagcactaaagactgtgtaacaccaatgcaggcaaatcaacctttggggatgggactacgctcactgtgaagccaagtaagttgtgttcttctttgcctaggccttcaggggcaatcaatcaaatcattagtttgaaaaagactttaatcctatgcatctggttgggctctttattaatgttctttccccaggccaaagagagttggttctcttccctgctttaaaatgggatatgagtgcatgtatgcacacagcatgcccacatgcagactcttgctctagctcatggtaagggcttctcaggagcatatacaacattttgaaagaaatagagaaacaaacaataatgagccaatggagctgtcaggaaggttctccaccacccctgaccaggcttcccagcaggatctctggccatataggatgtgcttgcactatatcggatggtctaggatgggaaatatctctctgtaattaattccaaaatttggcaacccttattgccagaaagtacttctcatatctaagtttgatctccctgctgcgatttaaatatctacttgaaaagaaccactagaactctgtacatctgggattgagaatcaagtaactgccatagaatatgaggctgagcactaagcccacctctgcagcacctctgacgtgtcatgggtcccctctggacattttgagctcaagtaataatggattaagcaggatagcacaagctttggaaacagaaaaacctgaattcaagtccttgctccactacttacctagctgtgtgaccttgaacaagttacttaatctctctgagcctcagtttccccatccacaaaatgaagataaaaatattcctacctcgttgagtcatcgtaaagatgaaataatacagctaaagtagttagcatagtgctcagaacatagaaaaagctcattaaaccctcgctattaataataatgataaacatcatctctaacccacagcagagcctttgtttggcccctggggctcttctgtcaaggttctgttgtgcatcagcagcagagctggaattggggggagggtggagaatgtcagcctgttctatgaaattcttcacctgggatttgaaagtggaaatacaaagaatcctgactaatttaaatacaaaatcatccaagtgtcagaggcaggggagaggtttctgcagagagctgcatagctgggatcctcaaggctacacacacacgcttggagcagggatgcggttcacaggatggcagggcaaaggttgcagaactgaaaccttgtacttccccatcaccaaaatgaccccagcatgatttcctttaaggtgtcccgagccccttcccaaaagacaggctccccatgtggaggggcaatgacagagggaagatggaaactttatgggaagggctatctatcccaaggttgtccttctcctcttcagggtagtgaagctcatgagaaatatggctcctgaaaatagccactaaatgaaactctccaacctggaggtagaggatcagtaaagtctgcagaggcaaaatgaggcagtttatttcaaagaaaagaggttgagggcaaggtgggagttaagtcacacatctaaatctgggaaaggaagcattaaacagaagacggaggggctcggctctccacctccaccaggattcagaccacaggacatggctaatactgcaagaagggagttaggttagtggtaaaacctttctaataggtttttgaacagtgaaaatgagctgtcaggagtagttgccagggcactttctctagagagtttttgaaaggagatagacaccctgctatcagaggtgattggagtgcagccctgcctcgaggcaggaggagaaatgagagaacctcttaaagcctctttccagcccccagagcctgtctccatgaaaaaggcccaggctcattaatgcagagctgcatcctccaggacacagggggttgctgggttgttaagtttggaacctttgccggcttagtggttaccaaactccctttgttctcaagacttgacttgataaatgggctggctttatccctttaaagccaaaaacacaggttctgagtgctgtgttgtttgtggtgttgagatgcccaggctggagggaggaagctctagggggtttttgctgagcccagaaacactgtggggataactatggtcagaattttgtctttggtcccggaaccagattgtccgtgctgccctgtaagtacagttaagtggagatagaaaatgagtccagtgcttgatgtggggagaagctgcagggtcttgaggccaggagtccaccgtgacctcaggagtggtgatggagaagaaggttaaaaaaggaatgagaaacagaaccataaggacaatacagaggaagggttcattttcgggaaggaaaatcacaaggccgtgtgattaacgctggaggaaatgcactcctttggagggtcccttctcaggagggctttgtgtcggggaaagctgagctgttaggtttttgatgctgagataatcactatgcagaaggacaaggcttctcctttatctttgggaaggggacaaggctgcttgtcaagccaagtaagtgacatataatttatatgtgctgaatatgattatctccaagaggaaaacttgccctcttttccacgggtgcctccttgggtcaggaggacattaaaggtgttgagcagaccaaggcccagtacctcgtcaccttcttcatccttgaaggagctttaagaggtgtggacgggaagaaacccaccaggaccccaccaataagcccagccttgagacccctccactctgtcagacttgaataagaaccatctgagaacaaggtcttcctcagaaggggactccagcatagtcatccccatttgatagattttgaaactcagggcggggcagagtggctcatgcctgtaatcccagcactttgggaagctgaggcaggtggatcacttgaaggtcaggagttcgagacctgcctggccaacatggtgaaagcccgtctctactaaaaataaaaaaaattagctgggtgtggtggcacgcacctgtaatcccagctactcagaaggctgaggcaggagaatcgcttgaacccgggaggcggaggttgcagtgagccaagatcatgccattgcactccagcctgggcaacaaaagcgaaacttcatctcaaacaaacaaacaagctcaggcaagtagaggccagtgattaacactcttccaataggaacagatcccaagcaacctgcagtagtttttccagtaggctcgtgaactcaaaacatcaagttatttaaatgacagggcaaccgttgtgatcagctgtcatttgagtagtgctgaggactgggtctgaccttgagtaaacgcctaggctggtgggtttctatccctgcagcatctaaagcggacgcccaggcttcactgaccccagcagtctggctttctgcccttgccgcccgggaggtgcagctcttggcacacaccatccttagtgtcttgaaagaagagaaattaaaagagaaagggggaaaagcttatatctcatatcatgcagttgcctcattttgtagcaagattgtttccccatgagcagtttgtcttcattcagcagctgtcttctctggggaagccattttgtagaggtgtttgtcacagtgtgacaactgacagctgggggaaattgcagtttggagcagggacccaggttgtggtcaccccaggtaagccccattccctggagcctcacctgcccttagtatttggcatgccctgcatgccaaatatttctagccgagactatgagaaacacatctgaaaggaagccatttccctgaacagcagtacccaaagccattaagcaaaaatgagagatcagactggtgttaaatagaaacgtttttggataaatagtaattctcattattctctatcagtctcctgtgtgaatacccttatttcccttataaggaaaaaagttacaataagcaggatagccatgattcatgctgtggtgtgggagcaatctgctgtggatttgggggtggaggattagaaatgtgttcaggcagactggatgtgtttttgacaggatatgtaacacagtgtgatttataaccagggaggaaagcttatcttcggacagggaacggagttatctgtgaaacccagtaagtataaaattgtatccctggattaagcaatgtctgtggattaagggctgatttagacccaattatacaccatatgaagaatgtttagagagggggatgagcatcaaataggaagccaatcgtcgtcctggctaggatctagcatctcagtgcaaaatgggctatgtaagtgtgcctctgggaattgctcctgatatatgtgttgggactaaaatgtatgactggctacttgttgtattggctgggatcatatccctggatttgtgcagtaattggtgacaagatttctaattccttaacaaaccttctaaggcactattctatttggctaagattatgtcaatttatagaaggaaagaaccttgtaaataatgatcattaaccaaaagtaatgtgattagtctctctcaaagtctgaaaaaccacttttttttaaaaagtttactcatgactactgagggacacttcctgtttctgagactttcagccaaaaattcgtacagcgtagcctcacggagcagagagaaccttgacaacattcctttttgactttctccatggatgagaaaactgaggctcagggaagagacagatcccggccccacagccagtctatggctgagctagaactagattttaggtctctaatttgccaaacctgtcagttggctcaaacttgaagtttgaagagtccgcaagattcatctgacaaatattttcatgtacttgccctctgccaggctcgttgctgaaaccagggatccaacaggaagcaaactcagtgtgatattgccttcatgaaacttacattctggaggtggattccatgtttcttcccagatatgacaatgcttaccctgatttctcttgggcatggctctcttatactatcatcacttccttaggaaatactaaaactaatttttgctgcagtttaaagtccttgagcagataactaacacacataccactttagtcaggagaagggaaatgcccaaaagtgaagtagaaaactaggaatttgtctgataattgattattataaagttattttatcagtgtgaaatgagtggccaaattaactggacaatgccagctctgtacctacctcactttgattctatagactcagtctcaggaggattcaagaattcagacagttctctgatgacataatccagtgatgcccacaacagaggaggcgtattctctattctggactttgtgagtctccttggatgaaaagattcaagtgctgttttgacacctaaaatcagagagtatttgctctatacatatatcaaaaatacacagttaatgtttagaactttgtagtggaaagtggaaagcaaaggtcccctaaaagaaaatgggattgtaaagacgaaggagggttagtttaggatttgtagaaagtcagtttggctactccagaccaaacctagattaacagtgatgcaggcctaattcaaaaggaagcactgccagctctttattcagtgctttgccaacctggcctgtttgatctggtttttgttgttgagcaaatcatagtgtttcttctggttctgcaaggcaactgacctttggatctgggacacaattgactgttttacctggtaggctgcctcaattaaatactatttgcactgatttactaatctacaaatgtattctgtacatgtaacttaatgggcctgaggttgaagatggggagagacagcaacaatgcatactagaaagggtaatgtgagcagagaattatttatcagagaccaagaagagaaagagaagctttttgctaaggcttttagtaataggagttaatgaaaatgaatagaaaaaaatttcattttaacttagaagaattgctgaataatgggaacagattccataaggggaacctctgcttctgaaaatatttgcactaggaccagcctacgtgctacaaaaactgtctcacaccaagtctagttggtcacttacatttttagcctattctagtagctatttctaaataagtcttcaaacatagaggtgcctatatttaagatatttaaatgaggctctatttctatagctctctggtgcccttccagcaaagcattgctgtaacacattgcttatcatttctacaagtgagaacaagtaagcccctggccctccaaaattgcatgagtattataattacttggcttagattgaagtcacttctgtgttacttctcataactgtgttcatttgttgagatctgtttaactccaaactgtgtgggcgtctaactgttggcactaaggtttcttttctcttgaaattgccagcaaaatattttacccataaataatgtttcatctagacttgcaaatgacaactaacactgcaggctctttttttttcttttgctttgtttccttttttctgaagggaatatgcaagcaggaagcaaaaaaaaaaaaagccaaaatgtacagtttgactgtggggtctgggaggagagtgtcaatgtggatgctaaaatatacatggttgtataatgtaggtactgtcacagagaggctatagtgatcttattagatcatacatacagagcaccactggtcagctggcgttgctcggggtgtccttaagaaaagctcaggtctagttgtcaagtgcaacccagattcagatacagagtctcagagagaagcttccagatcaccctggagctaaatgcagaatatgaattttccccttagttaagtctacctgaggggaattttcatttataattaggaaaagagaaaggtaaagaacatttacttgcagtgtcctgtttcaaatattgtgtgcattgagccagaggacacaagaatgaacccaagcagaaaactaaagaaaagaaatcaataaaaccactgaagaaaaccagttgcccttatcttgcctgtctctgataatgaatgtgccttccctgctcattcctcactttggttctcaaattttccagggaattagcaaagaactggtagggttgggttagtcttggtctaatttggttagtcatctctggataacaagtctcctttttaggaagtgccaggggattttttgtaatgccaataaacatggtgtacaacttcaacaaattttactttggatctgggaccaaactcaatgtaaaaccaagtaagttatagttgcctagaagaaaaagttaccaacacattatgctaaattcttcttttcagtctgtatttcagttcttttattttgcattttgggtccccacccatgatattttattagtccttattcatatgtcacttgaacagatatgtagtaaacaaatctcatgatcgagtagacatgctgaaactgccaatgttctcaaggtgctattctttataaggaaaatgcccaaattttaactgttgctactgaacaaaagagcatttggatataatttaaagcacccctgaatgtccaggatttcagagaggagacatgacaaattaaaattatatgtattatttaaagatgaaaagaattagatcctcttgaaaatactctaataactaacatttcttcaacattcgcaatatgcaaagcacctttcataccttgactcatctgaccctcctaacaaccctctgggatagatattacctatctccgcttcacagatgaggaaacagtgtgaaaggtaaaactaaagcaaagaggttgaaatagttacccaagggctcaccgcagatgaggggcagagctagattaagagcctggcctgcctgtcccctagcccactctcttaaccatggtcttggtgaggtttgtgtaggcgacctcgcactgtggttctaacgactacaagctcagctttggagccggaaccacagtaactgtaagagcaagtaagtaagaaagaaaagtccagaataattttaagcaaaatggtgggtaggtttttcagcaatttcacctaggaagtgcaatgtcaagaactaaattctaagagctttcccagtttgtgttagaaccataatttttctacctcacacgtctccctcgccttctctgtcacctcagaacagctcctcctaaggcatgacttcacaatggtacatttgttggtggcgcagtctttgtggtcagataaaaactgagctaattatctgaaattatctcaggtctctaagtgagagagttaactcctttcaaatatttgaagaactacgatgtagaccaggtaaggggtgagtgtggaggccaaatcaaaacgagcaggtgcaagatgtgccccaacctcccctcaaacattgttgaacaagtggaactgccctgagtggaaaggctgctttgtgaagtatggaacttttcttccttagatatcttcatgccagacccctaaggttaaccatgagatgttgcagaaggcacttctatgccattttagctattagattgaatcacctctgggctccctttcaaatctaaatgctaagatcccatgactcaagcctggaggattaataggtgagctcagacttgtttcttctatttttactattttgatagccaaagaaataattcatcaaattattcataagctaaagcctacttgggatttttacacctagaagatggtggggtatgatttcccagtgcagtaaatgagaaaacaataggagacatcaaggaggaaaaaaagaaggaagagataaagggaatgtcttaagggaggctcagaggttgaatgaaggaaatgaggtgattttgcagaggacagatgtggctatcaaagattttacaatttcacctttggaaagggatccaaacataatgtcactccaagtaagtgagcagccttttgtactcgaaaatagggccaggggagcaaagtttcttccaatttaaacacactcaaaaggatgtgtaattgctttctgatgggagggaactctgaaggtagaaagactattgttaccacagatcacttgtccctggagatatagcatctgaggactgactgtctagcttagactgctgtctgcacaagaagaagacttacagatgcttaaggaggatggaggcaaattttcaaccctgtactccaaagctgaggggagaggggatgggaaacattagggctgggttcatgtaaaggggaccagcattgtgccgacagaggctcaaccctggggaggctatactttggaagaggaactcagttgactgtctggcctggtgagtgagtcgctttctattccaggaaaatattactgtggagaaattaaaaggggagatgaattaactcctttagtcttgaaactaaagagatatgtgtacttcccctcctggaggaccccagtcctaggtagattaggacgaggaagcagagggagacaaaggcgatggaaagtcccttttaggaacccaggaatcagagagaacttgatggtccccaccaaaggcaaagaagggaggtcccactaaaacatgtgagcatcctaaaacacctgctctggtccacccacaatatttggtgaaggacatggccctccacccagaatgggcaagcaaactagaccagctttctaaggtgtgtttttcttgggtcctgtgactcttggccgtctccctgtcagaggctccatctgtcgctgcactctttcttattgagaatggcctctccgtggttctctgtaaactttccccaagaagcctgtttccatgcttcctcagcacttagcctcaccgatggatgggctctagagtagctggagggagtctgggtctgaaactttcactgagaaagtaaagttgatccgcagtatccagtggatatggcagctgggaggacctaggactgaagtactcgtcctctctttggggcctttcctgggcactcgattgaatacagaaaccctgttagcaagtgcatgcatgtatatgagtgtgttcattcagcatttccattctgaatgtatgaatagccttactctgaagactccctggagcttacagggctttctgttttcagagaaaattgcctttgtgagacaaaaatgccaagtgggcccctgaatgaggttatggttgagagctattaatattatccttattcacagagcaagatccgaattcccaaagcagagtagacaataactatgtgaagggcttagacccaaatatgtgcccacttgcaagcattccagctctatgaagaggatacagtgctaggagataggattaccctgcacattgcaaaccctccacttttccaagaccatagaaaatgtcctttgttgagcaccaactgagtgttattttcttggtccctgtggtttttgctgggccttaaatcattgtgtgatcaaagctgcaggcaacaagctaacttttggaggaggaaccagggtgctagttaaaccaagtgagtactggggcttgacccacaattgagccttgtcatcaatttgcaattcaatgtgccgtattggcccaaattaatgtctcaaacttgtctttaaaatgtttcatgttgctcttatgcataaacatgcacttatgtacaaattcagcatggataaaggatattgtcatcttgacattttctagaatctattttcttaagagaaggcacatagtaaaaggtacttttcttatttcttcacatttcttaactgattttcccaagaggcagaggaacttggacgtggcgtttctgtctattcagagtagttgatttgaatatggtcacaatagcagagcaaggacttacaatttctaaggttcaaaatattgctctctgtaccagcctgcagcctctgatgaaccattattctgatttatttcctctggccctcatttttcccaattaatgtaactgaaatattggtaaccattatcttccggttcacagaaagtgtgtgaggattaaaaagtcgctgctctgaaaaggaattgagctggagggttttcttttgggggattattgttttgttgatggtattgtctctttcattgagggagagaataagaaaggaggcatacttgaaaggcaaggtaatatgatcaatacatgaacgtgtgcaaaataaatcattaaggcattcaactagaagccaaaaaacagtatggaccccggctcagccactcactcactaggcagccatgagaagatcaccaagctctcccagcctcagttaacctaaaatgtggagattattattccagccttgactacttccaaaggatgctatgaaattcagatgagataatatatgtgaaatctccttgaaagagatgggtggtcaaatgattcatgatttttttttttttttttttttttgagacggagtctcgctctgtgcccaggctggagtgcagtggcgggatctcggctcactgcacagccgcctcccgggttcacgccattctcctgcctcagcctcccaagtagctgggaccacaggcgccgcactacgcccggctaattttttgtatttttagtagagacgaggtttcaccgttttagccgggatggtctcgatctcctgacctcgtgatccgcccgcctcggcctcccaaagtgctgggattacaggcgtgcaccgcgcccggcctcatgatttttaatagttagattttatgcaaaatttcatttgagggtaaacttaaaggtgaacaagtttaatggactttggccatggcagagaaatggttaggtttggatataaggtggacctctctaattataagaaaaaaaaggaacatgagaattggtgaacaagaccttccctggagatcttcagaaacctgaggtcactcaggagagaaatgtgtgaagttgagagcttacagtaaatggtctctgaagtttcccaccattccaaagagtgcgtgagcttaaaatttttcgtgagtttagctaaatatgtgcttagtgttagattaggtttcaaccaagcaaaagaaccctgggagaagtactctgcttggaaatgaagcatcctttggtttttgtggtacaatagatcactgtgggttttcagatggccagaagctgctctttgcaaggggaaccatgttaaaggtggatcttagtaagtattattactaatgaattcttaattgattagtttttgagacaagtaataagcttttttggaaatctaagtggactgccaaatgttctcgatttatccatatttcatggggagcagaattcttcatgccttctccatcctcacttctgccaggtagcagtttgcattgttaacagggaagcagaatggaagcttaacagagaagcagtatggaagacgtctccttagcccagtggtcagttgcatcagagaagtctgctctgaaatgcgaacactttctcttgcagctggcagccccctgcaacctcagtgccctccatggccagggcaaaagcttccaggtgcccagataacatcccaaagtcactctgagagaaaatcggtcttactttacccttttctaaccaggaatttacatggttagttttacatctaacacttcagcagggagaagacatgatctaaaggtccatgtggacactctgtgtgactcggatccaggatctgctctttcagcccctccatttatcgcaaaagggatgatgattaattcctccatgcctagacttcactttagacatcacctcagagaggcctgtcttacccagccaatctaacaagccatcaaacacagcactgcctggctgctctctaccctgttatttagcctgattttaattcacacactttcatcacttaacattatactatctgtgtatttattgtttgccttcttctagaccgtagacaccaggaggacggggacagtgtctaagtggctctcaccgtatccctagtgccggcacaatgtctttacacatcggaggtgttcagtgaacagttactgagtgaataaaggacttagcaccaactgccgctctttttcatgaaattacagagctttgctatttcatacccaaatactaaaacctactgagatttttgcaaatttccatcatttatagttatatccaaggtggatttgagtgagcaggtacatgaggtatttgcagggcctcatttcactgtgccaaccaggcaggaactgctctgatctttgggaagggaacccacctatcagtgagttccagtaagtacctgataattattgatcatagtgcttgtacttatcctgtagtcatatattgcacaggtgaccaaatgcctcctatttctttgagttaaggaatattgacatttgatgaggaaagccatttaaacacatgggaaaattggatgttgtctctcacccctaatactccaaccatagcccctgtcctattccatgctcttaaaaaaattttaattgatagaagaaagaaagattatctacaaggatatgagcaatttgctaaacagtggtaaaatgagattatgtacaggtgttgattcctaggtaaaaatgggggtcagagctgctatcctttggctagtaaaacaagattacttggtgaaattatgtaaatctcctcgaaagaaataagtttcagagttgtctagagaatatcacttggactgttctcaggctttccactacatctattgtaccactatggtgccctgaaaagaggctttctcaggcttaattccatggcttagtctttattccagtatcaaaaagggggaatccagccagagctcccatgagggagatagctgcatgctaaccacattaatctattatcaaggtaactcggtcatttttgtcaggcagcacagtgctgtgatttatagcacattcatctttgggagtgggacaagattatcagtaaaacctggtaagtaggcaatatgtcactaaagtaggaggcttaatgtggctactgagacccactaaacttactgcagtatttggaaggcccaagtgtcaagaaattaatggtttatgcagacttaagtggattccaatgaaggaagaaatgttaaagtaatggcacagaggatagaagagctagctgtgaaaaaaaatagccatgtggatgaaccaaacgcaacagactgaaagatcctagagagttgatcctaaagaaaaaggcagaaagtctggctgagcacttccagttcttctgacctggcttgattagtgaatctgggccacagtatctttatctataaaatgaaaacatttaatatcacctcagattttttgttttaattttgtgggtacataataggtgtatatatttattttaaagataagctaatatatgtgaaagtattttgtaaattcttaaatgctatccacagtgaaaatattatttgtttatagaacaaaaaaaactatgtcagatttagaattcttttaacatgagaatttgtaggttcttagtgaaatagccatttacatgtgatctgtagccctaggcattggtaaaaagcactttctcttctactgaaatatagtggctcaaatgctacccaaatgaaaagggcaggggaagggaagtcattttgtaaaggcaggcattacagtgtgaattctgggggttaccagaaagttacctttggaattggaacaaagctccaagtcatcccaagtgagtccaatttcctatgctttcctcttccttgtgttgtcttctctcagaccgtaacatttggagcacataaagagatattatgggcctgctcttctctggctgtttcaggagactgaaaaggattgtataagaacatcctttagcatgttcttagtattgttttgtccagtgtgtgtttcttcttaatatcaaaaaaaactaagacattgcctgtgaagccaatggaaaacagtagatttgcaaagaaaagaactaaagagaagacaagtggtactttttaccaagcttaaagcagagtgggtgtcctttaatcagagggatgcttggttctgggggctggataggactcaggtaagtaacaaggctaccactgagtcactgagcttctaaaatgagttgactcgggggagcaggaagctgccactcatgatgatctgaatgctattccgtgaagtttcagattgattgaagttaaaattaggggtgacactatgtcaggaatctaaaaattgataactgtaatggaaatgaaagaagggctagctacatctgttggataaatggagttgaaaatcatgaatttgatggcgacagacccagagagttgggcaggtagaaacttcatttcaagtgatatgcagtaaataccccaaatttgagtcaaatggcctgtgtaaaaaggaagtgaaaatgtaacccgtatctccttgtaggtgaaaaggccatatctctaggtcttaggtatgaaaaggatgtgtgggcttctgggtgtttttgactgactaagaaacactgtgggatggatagcagctataaattgatcttcgggagtgggaccagactgctggtcaggcctggtaagtaaggtgtcagagaggcaacagaaagattgagggtaaaatgtcttcatgtctcaggaaatgattgtataatgcaaaatgagctggagttttttaggagcactgttactagagttctgatgtctggttctagcaaaagaaccctaatatagctgtaatccctctctagaaggaacaaggaagaggattcttctctgaaagctcctcctaagatttatccatcctctgccaaagtgtcttgtggatccaggatacttacatctttgttagcagtgctggcccaacctgctcagcctcagatcacctatccctcatttgtaaaatgaggataatatttaagctcatggcacagttgaagcccaaatgaggtagtggaatatatgcagattattaatccatttggctcataaatgaaggttttctttccttttccctatgtagatcatgggttgaaatacctaacactgcaaatcatttttgtatggggatttgctatagtgtgaattcaggatacagcaccctcacctttgggaaggggactatgcttctagtctctccaggtacatgttgaccccatcccacccatgttttccccttatctggtttaaggcttccatatgtattgcgtgttatcctcatggatttcatcatccttgttttattatcaatgttctgtgaatttaagattgagcctccatggactcttcatttaaaaatgaaaatagctaatagaagagttggaaataacagtagaactaattcactaggtcaggatggagaagggagtaataccctagacaattaggacaaacgatggtttttccagaaatagcctcactcctgtttaagcctagacgtggtctctccccgggcacccttcacattcctctaaccctccatatcccaaatttagctgtggaatcttagacaatctgtgacctatgcagctacagaaatcttttcttactgagatatctgcctatttgaaccaaaagatccttgagaatagacagtctctaatattccatgaagtgtctgatatggtccttttacaaaagtaaatacttgataaattcttgcttaattgaagttaaacacccaaagaaatcaggtttccaggccaaagggaagaagaaaattaagcaaatgacacagtacatttgagcgtgtagtggggaggaagaaatgctagattgggattcaaatagagccatgttttggtctctgctgccaactagcaatgtaacttagaccagatctcttgcctctaagcctcagtttctttatctgtaaatggggaagtgggtccaatggccctctttggcctcttagtacaaaaagtctatgaatgtatcccatttggggcacttttttctcctaggagtaactcaatagctattttaaagcttgagtgttttctaactcattagagcacatcaagaagaggggtgaagtgacaaaagggagtttattgtgaggcatcaaacactgtgatactcacgggaggaggaaacaaactcacctttgggacaggcactcagctaaaagtggaactcagtaagtatgagattctatggtaattacaaaatgtattctggtgacaataagtggaagaaaaggtgatgtaatttttgtcattgtatcttatttttaatctattactgaagcattaagaattgtgacatccagataaattagtgaaagtattcaaaggctatataagcatgctttctttagggtggaatttagctaaccactaagactttttccaagatatgagattttcagctctcttcaacgtgagagtttttaatactagtattaagctaaacgatgctcaatggaagaaaagagctagaagagcagaaaattgcaccgtcatgatcaaatagatcctttctacttccactgccatggactcagtggtgcatttagaagagggtattcaaggtcattttagccatgccccaaaaaaaccactcccaattcattccagagattgtgcccccttatgctaaacatcatccaagaagagtcagtgaagtacagagaaaggaacccagggcttcttgtttcggtccagagttctaggtttgatttggtcccaactggatgtgtgatattggaacgagtcattgcccctctctgcacctcagactcctccagtggatgagggggtcaaagccctcaaaatctgttgttctgggatttcgctattataccacccgagagtttataggactcgagagtatggaatcttgtgagtatttcataaacaaattctatgaccctcaggaaatagccctgttaatcaacaacctaacttaacatagaaataataaccaccatctcagtccctaccatgtttagatacgatgctagatgcatgacatgtagaattgttcatctgaaataactctgtgaggtaaggggaagtatcttattttacaaaagaagaaactgaggctcagagaaggaagtgcccaagatcccaaagctagtaagtaaagggcctaaatttaaacttgggtctgcctgcctgactaaaaagccctgctctttcttttttttaattttattttatttatttatttatttatttctgagacagagtcttgctctgtcacccaggctggagtgcagtgcagtctcagctcactgcagcctctgcctcccaggttcaagcgattcgattctcctgcctcagcctcccaagtagctggggttacaggcatgcgccaccacacctgaaagccctgctctttctactgcatgatgtcgtagagcttgtgctctagtttacttagaaatgagaggtgatgccaatcacagtgactggtgaaatgcttggaatttatcttttctactttagatattgctgtgagttagagagggtgcttcgggaaatcttgacatggatgccccaagtgtctaaagagttctcctcccctttcaatgacaaaacaaagtacagagttgctgggagcatttaccccaatagggagaaaagagaggggagctggctgcagccactcccttgttctgactgtccctttccttcgctgtttcttgtattttccccaggcagaccagccaccaatataactgatctacaagagcctgactcctttgtgagttatagagaaatgcagggtgaaggcactttgcacatagaactttagctctgagagacagcctcaaaatatctagttcacccctctttattttcccaataaggaaattaagacccagagaggttggctgaattgtctaaggtcagtgcgaactagggctgggactagaacctggagatcctggtcctggggccatattctgtgactgctgtttggtgaactaaacttctgataggtaggaagtgtgagttatgctcataaacaggaaaaacaaataggttttacaaggggagtataaaaatgtcctccttattactagcaccttagtataggctccctagacctgctccccagctgtggtgtaaaaatggaaggagaaggaaatggcccattttgtcgcagtgcaaatcactgtgggaaatactggaggcttcaaaactatctttggagcaggaacaagactatttgttaaagcaagtaagttccatgaaataacctgatttatattacagttgaagaacatctgttttcattgatttttttctttttagggggaaggggacatagttttgtctgccagttaaattagaagatacattggcaataataatgttgcactgtacagtatccatgggcatcactcttgcaagaaacatgtataattaacaaacagttaagtgtggatggtaaaacttccctaggtcctatctagaactgaaactctgtaattatattaataacttttttaacttgaatattagtgacatttttatataacccaaggtatacaaagcagaatcttcagttgggttctatctgatttgttgtcatcttccaatggtcttaggaaaattaaggttaaatagtaagattagatgcctcctaccactttggtacatgcatgcagacatagaaacacccttagtaactaacttgcatgtgacttggcaatcctagctatggcccagtgacagggtcccattttgtacagagttatgtcagagtgtgaacacaggctttcagaaacttgtatttggaactggcacccgacttctggtcagtccaagtaagtcaaatctgcagaaatgtgtagccctatcctcaatattgggcatatatggatataattattctggtctataatagattattattactactattttgttcttattaatcataacaatgctgctaatttcaaatatacattttctgccatattattatttttacctttaaggagaattattgtcaagatatcaggagggaaatatttgaatttcctttgagtcaagtttcttatttgttcgtcagttcccacctctctgctgagggtcatatgaacctcacgatgttttggtttttataccgccttcttattatctctcttagaaatgcttccttggtttttccttgcctaagcacttagattttgcagctcacatttacccagagtatacttagcttttaacctctcccaaaactggcctccctgtcccaataattatgcacagtaaaagtcagttcaattcagtaaatgattattgagtatcatcaacaaaccagggaatcatcattggttttaaaagaaagaaacaaagaaaagaatttttaaaaccctaagctatcttaggcttctgatctcaagaacttccagtcttatcagagaaactaagcactcataataaaaagtctaacaaaaatttatatgtgtatgtgccaagataggggggtgggtttcctgagggctggagacaggacaggtatgaccatgcacagccgcattctttggcagagaacacacatgattcccccaaatatgtttctggaaacggaattgagtctgttctgtgctgagatctttgactttcttgaggacaaaagcccccttggcagttagcatccttgagcgggggtgaggacagaaacaggaatgagtcaggcgtgagtcacccaagactctcactcagccccaagaggatggagtgactctgagtcatgccgaggcatgtctttagcatgtgctccagcagtgtgcatttatggcaaggtgaaaaatacatttttgcacatgtcactaggaaaatggtaccttcttctcaggcatggcagatgaagtaggaaaatgcccgcctgctctctggtatctttagaaatactcacacccatccagcctatgtaggatacaatgtttttcatgaagttttatgaagattctgtttttcccaaaggagaaatagccaaagctgtgtttattgatagctgtgatgaggaaaatgaaggccaacaggtagcagtggggtctggtgctgtttataccttttagggaggttccttcaagtcttcataccacccattacaaggaaaactttagcatccgcctttcagggtttccagatcttagagctactgtgaaggggatgtgtcttcagagaaggggtgggcaaaaccaggaggtttttgtaatacacttacacagtgtgactatgggaacaacagactcgcttttgggaaggggaaccaagtggtggtcataccaagtaagtgagctgggatcctcctgcacaaatggccacagcacccccatcgctaccctgtgctggagagcctcttatcatatttccatgggagcgggggaaggacatgccattcatcagtgctatatcgaagaaccttaggcggccactgtcccaaatctttgcctgtccctggtttctttcactctccccttctctgcatctccactgaccacactcccattctcatgtaagctgcccctgatcttccctgaggctggatttcagattgaacaaaggaccacagaagtgagagctggaggggaccgtggggacatcttgctcatgttgcagagggacctgatgccagggtctagcatctgtccaagaccgtgctgatggtcagtgcacagcagtggaggggccccagccctttactcccaccctgagtttggtggagccacacactctttgctaagtgaccctcaaacccagtgtgagataagctgagtgttgacagtgcccacctgctaggcaaccaagtactgagttcctgccccagctcaggactgtggcgcaggccatgacctccctgagcctcagttttcatatctctgaagtagacagcatggtctctgtttcctcccatctttcaaaaattctatggaaattattgtgacttttttctctgtaattgtagggtttcacagaggcagggccttgtctgagtcaaggtcattagaaataaaggaatccaagggctttggatgccttggcctaattctaggtggtaaagagggaaggatgaaagcacaaatcacaggaagtgcctaaatcctgcttggatttagtgttgcctcaaacagggatatgcagaaatccaaccccagggtctcccataggaagaagactaggagtgggaagtgccaaagagctctggaaaggaaaagagaacaaggagcactctgagaaaaggaggtcagaacagcttcaggaaaaacgtcacataaaatttcctttgctctctgtcctcgcagcactttcagaagctccttgcatctgactaaagagtagcagagccagaccctcagaatgtctgccccaagcaagcagagtgtggtgtttgtattggggtgctgggagcagacatggggagttgctgccctgcttctctgctgatgggaaggtggtattttcccctgggtacacgggggccaaagagctctccagtccccagcccctggctcccgcccctgggctccagcactcgggggctctaaggacagcagtaggagactttctacaactcagagagtattcaggagggtttcccaggatgttgcccaataccatggggcaattggtagagggaggtcacatgaaacaggttttatcaaaggctgtcctcactgtgtgcatcaggaggaagctacatacctacatttggaagaggaaccagccttattgttcatccgtgtaagtattatagaaatgatcaagggaaattttgcagacagattatattatggaaggatactgtagtagtgagagtttgtgttgtgatctattccatcattaaaggagtcctttgttgcctgggagtaactatcagtgtcaggtctgatgagatgattgaggctgtgccggacaagggttttgcacaatgatttcagaggacaaatccccaagttgtgaaaaaagacttcactcttggttaggtttctaaaacagaactttcttcttggcaaccaaggggtctactctgccccctcactcctatgtctcttccacctgagactctgtcaccacctcccctagaatccgtgagataccttcccctgaattagagcataccagccagggtgctgaggcactctgtggtactggaatggatggtacagggatgcgtttctgggcttctggctgcaagaagcctcatcctttcccccagtgtaaagcattgctgggaatcatcccattatgagctactatttactgaatgcctgacacgtaccagtggccattctcttgtcttttatgtaatcctcattcagtgattacacacatcctaataataggtagccgatattttgcccattttacaggtgaggaaacagaggcttgggataagtaaattatccaagattatatagccacgaatgacagagctagagtttaactcaaatctgtttgactctagggccttgttattaaccgtgccaccaccatgcctcctgcattctgtgaaggaagacttcacacctcaaaggccatctgtttggcctttggtttgcccatcctgagccttcttaccatagcgaccatggcatggtgactcagcacttctgaagagatcagcagagtcattgggttgggtggcagaatacaggtatggcagggagggaaggagaaacttagggggactgtttattgcgcatacagttagagagaaagaaaaatgtatcatcaaaccatagaataggctgcttaaaagtttttctcccaagaaactgtgagtgtatgagggtcatgggcagctgcccccagctggcagagggcaggattttgtactgtgatgtaccagggtgtggacacgggcaggagagcacttacttttgggagtggaacaagactccaagtgcaaccaagtaagtacccaaacttaggctctggccaaagacacagaaaggccctactctgctttcttagatgatgaatctgtacttcctgaactaatttttcatgtttctttatgaggcttgaatatcttgaaattttaattcctagccactagcttaatagtctgttttctaacggtagtatttgccaatgggaattggccatttcatcattgcagagacagattcctttgagacaaaagatctttatcagaaaagaaactgtgactgattatgccaaaagatttatttttgttccatttagttttcatgaaaggtgatgaattatgcttcccaaagactctgggcattggacacactttctcaaaactgcacatccaattgagagatataggaagaacttagagcctaaataatgccataaaaataataaaaagtttgtaaaaaggaaccatatagaaattaaagaagaaatgaaatagtcttaatgaaagaagataacagaactgcattagaaacgaatggaaatatttagagggtttatgtattcaacaaatatttattggacaattattttattccaagcactatgttaagtgtgaggaagggaatgggagggaagggaagggaaggaaaggaaagaaaggagaggaagtagaggaaggaccgggagggagggaagaaggaagaaaaggaggaaaggagggaaggagggaggttctctttcatccagggaaggagggagagtctctgccatctgggagctcagagtgcaaacagacaactatagcctattgtcaccacgtcatagtggaggtacatgcaagttgcaatggaagcacaacagaagacatgactagcctccaattctcattgcctggtacatacacacatcctccactataccttaagctccatgagggcaggaccctttttcatcctcacagctctacagctcagcacaatgcctggcacataggtgtcaccaaacaaatgattgtggggaaaaaaatgccttctggctagatgagttatgatttatacattaacaaatattctctaacagagagagttgttagacctcaaaaccaggagattgcagaatccatccagatgtctgtggtgggagaaggcccatctctcagggaagagcacctctgtatttatctgttcatatgtgtgcttcatcaaagcctcttctcagccatggttcaggctgaatttataaagcttgaaacctatcgtatttctcaagaatcagagatcagaggtggaaggtttacaatatctcgataagtaagcagtacaaatgagttctagcagtaaaaaagaaagaggtctaatgataaatatatgaagcctgtctccacttgagagacctcctagaaaagatttgttctaaggaaacttttctccattaggagcagaatcatcttggaaatatacagctccaagttgtgttagaaaggtgtgtacaaagaagaccaaaaattcacatttggaataaggcattaaagttgccattgtttctagtagggaaaccctgcaaagtgttggggcatcgtagatcctgcatgttgacgcctgcaactaatctgccccggagctgttccgacagtggctggagcatttgctgcacagttgcataggtgttcaacaattgccaaaataaaatgaagctatttcgtgatgattagaaagaaataatcagcatcaatgaggcctctgatgcatcttcaggagtgagtaggtggaatgaagacctggtaggtgagacttttctctcttgtcagagaaagtttgacttgggggagcctggaaaacagggacaggagatggagtgccccagccaggcttgccctgcccaggtcagagttcttgtaaagcaccatctgattgtgtgttttctggtggctacaataagctgatttttggagcagggaccaggctggctgtacacccatgtgagtatgaccctgcaagtgaccagtgcaaaaagaactgaccacttgtctatgagaaaacaggtgatgatctatagcaaacttggggatatattgagaagcactcattttccattcctacaagctctcttggtgacttaaaatgttcccatttctcatatgaaacacagaagtgccaagagccaattgcgtaaatgaaaatctgagcagaataatttatagaaacataaaaagagttccaaataatgagtgctttcaagcgaagctgataatatcggcaccagataatctgaacattcaggaaattagctaagtgcccttgggggaaagagatgagttaatggcaaacacaaattctcttttattgcagcatgtagctaaattccctggattggctaataaacatggtatggggatccctactcatagaatcttcctctctggagttaggagagttttcagcttcctcctaagggtaaaagtggcccagacccctaactgaacggcaagtataccacatgcaattacaaggtatagaggcagcaatgtagagggaggcccacagacctggggaaaatctgggctctactctcactggctgttttcaataaagcctccactttctcagcagcaaaatgactataactacatcataataatatgagataatggccagaatgtaaaaagtgatcaataagtagtagcttttctaaaatattattataattattattattgaggctttgcttatactaaggtttacactatcataaagggaaaggagaatcgcttccttgggaaataaaagatgtaagcaacaaagacccaaggagccttttagaatgttgctctgggaccccagtggcttccagcagattagcatcaagaaggttatctcaaagaccttacccacagtgggggtacagcagtgcttccaagataatctttggatcagggaccagactcagcatccggccaagtaagtagaatgaagcaggagagcaagggaggacggacaactatttcttctttgtccaaaatgccaacttgaacccaggtattttcctctgtgggctccaaaatggtttcttccacccatccccagaaaatcctcccatccagctctcggtgctctgcagacatcatccttaggctgggaccttaggaaccatgaggcaggcaatgagcgagtactcctgaaccttccacaaacatatccaagatactgctgcctggaattgaggtttttgttctagggaattattggtttattgaaatcatatgaagtcacaacctcagcccagggaatcacagcagaatggaacaggaggagaacttttgtatcagaagcgaaatttcagtgcaaaagagcagaaggtttaggcctggcgtggtggctcacgcctgtaatcctagcactttgggaggccgaggcagggagatcacaaggtcaggagatcaagaccatcctggctaacacagtgaaaccctatctctactaaaaatacaaaaattagccgggcgtgatggcacgcgcctgtagtctcagctactcgggagactgaggcaggagaattgttgaacccgggaggcagagattgcagtgagctgagatcgcatcattgcactccagcctgggcaacagagcaagactccttctcaaaaaaacaaaaaaaaaaaaaaaaaaagaaggtctaacccttaggagtgtgattatcctgttctcctgccttgtgggggagatcagtgtttctcttatttaagtaataggtaggtcctgtgagtttgtgcaatggtgtcacctacggtatgaatactggaggaacaattgataaactcacatttgggaaagggacccatgtattcattatatctggtgagtcatcccaggtggcaccacgtgcaaccccatgggccagtgtcactaatcctttctctggagatatcacttattactatggtgaggcttgctgtagatgttgtaactaattttcttacagaggtctgggaagggaaaagcattactatctatcttgaatattcatgtttctctaggtcaaacacattaaaatttgactttaatcattcaatgggtattgtaaaatgccttctatgtgactatcactctataaaatgttagactgagtatgaagtgtgagatagattcctgtcctgtcctcaagtggtataaaaactagacaaaggtactgaactattgtaaattaagcagccagaaaactattttagtattgaccagttgatgatgtcaatggacacaatagagattcagaggggatagggtgctggctgagaagttggcctagactgagaagtttcctgtggtacaaaggattcattgagccctgaaggatggataagatctgtatgggcagagaaaggagagaagggaagttctgggcgtagggaacgacaagaaagaaggcatgatcttgggaataatcaaggcacatgcaaagtagcctaagtatacatctgataataaaattggttgaaaagtagtcagagaagatgtctttttaggcatggaaaaaggaaatactagagcattcaacagaatacagaaattagggccagggccagccattgggaaactgagaatccgatttagagatgcagactagaagtgaaggtgagagcagccagctatggtgccgcagacctcccctctccttcctcagtgggctctgagaggggtcatcccacaccttagaggaggagaaacctaagggattctgtaatagagacacggggcatggtatgaaagtattacctcccagttgcaatttggcaaaggaaccagagtttccacttctccccgtacgtctgcccatgcccagagtttcctgatgctcactaaagcctcggtgggacccagagtgactgtcactaattctgatttctgggtccctagtgcccaaacacaggggacagatttaatggtaaggaagctttcaatcactgctgtgtccctagggatctaaagcactagagcacatgtgcttctgcagttcattttgaatttaaaggacagcttaggatctagaatagctgaatttccacctcaaaacattggttccgtcttgccaagcctaccttctgatatcatcagtgatgggatgtgtttttcttactagggtagaataggatgtctctccccaaaggactctggcagacagacccctaaacacctccaaattaaaagcggcaaagagataaggttgaactagacgtacatggggataaaaagtataaaaggtacatgggaatgaaaggataaaaaggctaaaaaaattaagtacctctaactcagcccctgttgccatttctcagagtcttgtgttctgtggcattgcgctttctagaccaacagtgtccaatagaactttctgtggcaatggaaatgtcctgtcaatctgcactgtcccatacaatagccaccagctacatgtggctattgagctcttgaaatgaagtttccatttttaattgaaagcattttatttcacattgactaatttttatttcaacagccacatgtagctagagactattataccagacagagcagcctagatcttctccagtctgacacccaccagccccaggacttgagtgagtgtttaaccaggactcaaagttgggtttctgccccacaaggccaccccctttcctctttaaagccaacctgcatctggtggcccctgatcccctgccttgaggatcggcacttccagactcctctccccctctgcagtgctgtccagtacccccactgatgactaacaatcagggggatgtgttggtagagctaatggctttctgtctgtcccttcccagcaaaggaactatgccttagggccttcacccagagtgatgtcaggctgcccaagcatgaggagggaagtaggcagaatcctctggagccaaagctctggatgtctctcccctctgaccatggagcccacccctgctccactgctccagggacagccctatgctgcaggcagctctgcccccactcagcatcccaggggctgatttctttggttttggatccagctggatgtctgcattgccgaggccaccagggctggctcagcaactgtcggggaatcaccagggtctgagaaatcttgtgcgcatgtgaggggctgtgggagcagagaacactgggtgggaaattctaatccccaccctgctggaaactctctggtggccccaacatgctaatcctccggcaaacctctgtttcctcctcaaaaggcaggaggtcggaaagaataaacaatgagagtcacattaaaaacacaaaatcctacggaaatactgaagaatgagtctcagcactaaggaaaagcctccagcagctcctgctttctgagggtgaaggatagacgctgtggctctgcatgactcactagcactctatcacggccatattctggcagggtcagtggctccaactaacatttgtttggtactttacagtttattaaatagatgtttatatggagaagctctcatttctttctcagaagagcctggctaggaaggtggatgaggcaccatattcattttgcaggtgaaattcctgagatgtaaggagctgctgtgacttgctcaaggccttatatcaagtaaacggtagcgctggggcttagacgcaggtgttctgatttatagttcaaaacctctatcaatgagagagcaatctcctggtaatgtgatagatttcccaacttaatgccaacataccataaacctcccattctgctaatgcccagcctaagttggggagaccactccagattccaagatgtacagtttgctttgctgggcctttttcccatgcctgcctttactctgccagagttatattgctggggttttgaagaagatcctattaaataaaagaataagcagtattattaagtagccctgcatttcaggtttccttgagtggcaggccaggcctggcgtgaacgttcactgaaatcatggcctcttggccaagattgatagcttgtgcctgtccctgagtcccagtccatcacgagcagctggtttctaagatgctatttcccgtataaagcatgagaccgtgacttgccagccccacagagccccgcccttgtccatcactggcatctggactccagcctgggttggggcaaagagggaaatgagatcatgtcctaaccctgatcctcttgtcccacagatatccagaaccctgaccctgccgtgtaccagctgagagactctaaatccagtgacaagtctgtctgcctattcaccgattttgattctcaaacaaatgtgtcacaaagtaaggattctgatgtgtatatcacagacaaaactgtgctagacatgaggtctatggacttcaagagcaacagtgctgtggcctggagcaacaaatctgactttgcatgtgcaaacgccttcaacaacagcattattccagaagacaccttcttccccagcccaggtaagggcagctttggtgccttcgcaggctgtttccttgcttcaggaatggccaggttctgcccagagctctggtcaatgatgtctaaaactcctctgattggtggtctcggccttatccattgccaccaaaaccctctttttactaagaaacagtgagccttgttctggcagtccagagaatgacacgggaaaaaagcagatgaagagaaggtggcaggagagggcacgtggcccagcctcagtctctccaactgagttcctgcctgcctgcctttgctcagactgtttgccccttactgctcttctaggcctcattctaagccccttctccaagttgcctctccttatttctccctgtctgccaaaaaatctttcccagctcactaagtcagtctcacgcagtcactcattaacccaccaatcactgattgtgccggcacatgaatgcaccaggtgttgaagtggaggaattaaaaagtcagatgaggggtgtgcccagaggaagcaccattctagttgggggagcccatctgtcagctgggaaaagtccaaataacttcagattggaatgtgttttaactcagggttgagaaaacagccaccttcaggacaaaagtcagggaagggctctctgaagaaatgctacttgaagataccagccctaccaagggcagggagaggaccctatagaggcctgggacaggagctcaatgagaaaggagaagagcagcaggcatgagttgaatgaaggaggcagggccgggtcacagggccttctaggccatgagagggtagacagtattctaagtacgccagaaagctgttgatcggcttcaagcagggaagggacacctaatttgcttttcttttctttttttttttttttttttttttttttttgagatggagttttgctcttgttgcccaggctggagtgcaatggtgcatcttggctcactacaagcctctgcctcccaggttcaagtgattctcctgcctcagcctcccaagtagctgggattacaggcacccaccaccatgcccggctaattttttgtatttttagtagagacagggtttcactatgttggccaggctggtctcgaactcctgacctcaggtgatccacccgcttcagcctcccaaagtgctgggattacaggcgtgagccaccacacccggcctgcttttcttaaagatcaatctgagtgctgtacggagagtgggttgtaagccaagagtagaagcagaaagggagcagttgcagcagagagatgatggaggcctgggcacggtggtggcagggaggtaaccaacaccattcaggtttcaaaggtagaaccatgcagggatgagaaagcaaagaggggatcaaggaaggcagctggattttggcctgagcagctgagtcaatgatagtgccgtttactaagaagaaaccaaggaaaaaatttggggtgcagggatcaaaactttttggaacatatgaaagtacgtgtttatactctttatggcccttgtcactatgtatgcctcgctgcctcattggactctagaatgaagccaggcagagcagggtctatgtgtgatggcacatgtggccagggtcatgcagacatgtactttgtacaaacagtgtatattgagtaaatagaaatggtgtccaggagccgaggtatcgtcctgccagggccaggggctctccctagcaggtgctcatatgctgtaagttccctccagatctctccacaaggaggcatggaaaggctgtagttgttcacctgcccaagaactaggaggtctggggtgggagagtcagcctgctctggatgctgaaagaatgtctgtttttccttttagaaagttcctgtgatgtcaagctggtcgagaaaagctttgaaacaggtaagacaggggtctagcctgggtttgcacaggattgccgaagtgatgaacccgcaataaccctgcctggatgagggagtgggaagaaattagtagatgtgggaatgaatgatgaggaatggaaacagcggttcaagacctgcccagagctgggtggggtctctcctgaatccctctcaccgtctctgactttccgttctaagcactttgaggatgagtttctagcttcaatagaccaaggactctctcctaggcctctgtattcctttcaacagctccactgtcaagagagccagagagagcttctgggtggcccagctgtgaaatttctgagtcccttagggatagccctaaacgaaccagatcatcctgaggacagccaagaggttttgccttctttcaagacaagcaacagtactcacataggctgtgggcaatggtcctgtctctcaagaatcccctgccactcctcacacccaccctgggcccatattcatttccatttgagttgttcttattgagtcatccttcctgtggcagcggaactcactaaggggcccatctggacccgaggtattgtgaagataaattctgagcacctaccccatccccagaagggctcagaaataaaataagagccaagtctagtcggtgtttcctgtcttgaaacacaatactgttggccctggaagaatgcacagaatctgtttgtaaggggatatgcacagaagctgcaagggacaggaggtgcaggagctgcaggcctcccccacccagcctgctctgccttggggaaaaccgtgggtgtgtcctgcaggccatgcaggcctgggacatgcaagcccataaccgctgtggcctcttggttttacagatacgaacctaaactttcaaaacctgtcagtgattgggttccgaatcctcctcctgaaagtggccgggtttaatctgctcatgacgctgcggctgtggtccagctgaggtgaggggccttgaagctgggagtggggtttagggacgcgggtctctgcgtgcatcctaagctctgagagcaaacctccctgcagggtcttgcttttaagtccaaagcctgagcccaccaaactctcctacttcttcctgttacaaattcctcttgtgcaataataatggcctgaaacgctgtaaaatatcctcatttcagccgcctcagttgaacttctcccctatgaggtaggaagaacagttgtttagaaacgaagaaactgaggccacacagctaatgagtggaggaagagagacacttgtgtacaccacatgccttgtgttgtacttctctcaccgtgtaacctcctcatgtcctctctccccagtacggctctcttagctcagtagaaagaagacattacactcatattacaccccaatcctggctagagtctccgcaccctcctcccccagggtccccagtcggtcttgctgacaactgcatcctgttccatcaccatcaaaaaaaaactccaggctgggtgcgggggctcacacctgtaatcccagcactttgggaggcagaggcaggaggagcacaggagctggagaccagcctgggcaacacagggagaccccgcctctacaaaaagtgaaaaaattagccaggtgtggtgctgcacacctgtagtcccagctacttaagaggctgagatgggaggatcgcttgagccctggaatgttgaggctacaatgagctgtgattgtgtcactgcactccagcctggaagacaaagcaagatcctgtctcaaataataaaaaaaataagaactccagggtacatttgctcctagaactctaccacatagccccaaacagagccatcaccatcacatccctaacagtcctgggtcttcctcagtgtccagcctgacttctgttcttcctcattccagatctgcaagattgtaagacagcctgtgctccctcgctccttcctctgcattgcccctcttctccctctccaaacagagggaactctcctacccccaaggaggtgaaagctgctaccacctctgtgcccccccggcaatgcaccaactggatcctacccgaatttatgattaagattgctgaagagctgccaaacactgctgccaccccctctgttcccttattgctgcttgtcactgcctgacattcacggcagaggcaaggctgctgcagctccgctggctgtgcacattccctcctgctccccagagactgcctccgccatcccacagatgatggatcttcagtgggttctcttgggctctaggtcccggagaatgttgtgaggggtttatttttttttaatagtgttcataaagaaagacatagtattcttcttctcaagacgtggggggaaattatctcattatcgaggccctgctatgctgtgtgtctgggcgtgttgtatgtcctgctgccgatgccttcattaaaatgatttggaagagcagagactgtgcctctgtttgactgggtttggtaggagtcattttctgcttgctggtgatcactagctgggcagagaaaaaccaaggcatttgtctatgatgctgtccaggaagcctcattcaacaagctgcctaagtcaacctcttcttggaataacctctaaaagcttccgcttagcaggctatgctaagggccaggaaaacccacctaccagcttggacccctcctctcccactctcatgccacgccacgggaccacccataacaggagcccacacacatgggtggcagtgacctgcggcagacagggaccacacagcaagtgtccccaaaatgccacccactgtctcctgccctccaggagcatttcctttgcctctcctctcagactgggtttccactgaaactgtgcattgtctcacaaattcgtggctggggaccacccaccactctgctgcctgatccagccccacgccagccctttgaggtgcccaagctgacaccaggagcaaggttgagaggaagctgtgaccccagcaggactttatgttcccaccatcccggatgtgagaatgaggaaaaaaggagatgagctgtctccccacaagcccagagatttgaccgaggagagtagaggcctcgagctctcacctaagagaaaagacatggggctccctggggtccacagctcactgcgctctccctcctgagactcctgctgccagagcacctttccccagggtcatggatgctgaagggaacacaacttagagaccactccaccatccacccagcaagcacagctaccaagacccaaagctgaggcttaccaacgcccagggtgggagggggttccatccctgaataactccatggttcccctatgcgtctgaccatcccagccagaaatacataaatcatctcagctacaattcaggcctgcttcttttcatagggatgaagctacaggttgagtatcccttatctgaaatgcttggtactagaagtgttcaggttttggattttttttttttttttttgaggctggggatggaatattagcattatacttaccaattcggcatccctaatctaaaaatctgaaatccaagatgccccagtgagcatttcctttgagcatcatgttggcatttaaaaagtttcagattttggagcattaccaatttcagatttttgaattagggatgcttaacctgtaccagctttaataggtgacctagagcacatccctcccctctacaggcttatgtgttgccacttacgaaatgtcgggtaggactggaggctacctcccactccctgcacctctgattctgtgacccctgtagaattaagaaccagtgtcccttctcctggtcagccctactgacgggagtcacagaatccccagttctttctaagctgccccatctctcacctaaatacaatccccttaaataacaccaaagggaaagggctcagacctccatcacagcagggtcactctcgcacgtggtaggaccataccaccttcacaaaggcggggtttgccacctttggggagctctggggggcctctacctcctcaccagtctgacacaatgccagagattccaccactgggaatttcttataattaaagcattctcttccctgtattaaatgaaaatgcccctgggagagttaatagagcaagcctttatcaaccattaaaaactgagggccagttagtttctctttcttttccccctgaagtggtacttcattttgttttatagaaaaaagattcaggcaagggaagtgtgggtggctggggaggcaggtctgctcctttgagttggctgcagtgacatggaagtcacagggctgagggaaggagacaagagcctggacagcagtgaaggggtcaaagacagacccctccaagaacctcagaggagacccggactgcaggagacctgcaggaggcccgcgggagcctgtggaggcctgtggaggcccgcgggagcctgtggaggcctgtggaggcccgcgggagcctgtggaggcctgtggaggcctgtggaggtctgcgggacgctgtggaggcctgtggaggctgcgggagcctgtggagcctgtggagcctgtggaggctgcgggagcctgtggaggtctgcgggagcctgtggagcctgtggagcctgtggaggcctgcgggagcctgtggaggcctgtggaggcctgtggaggtctgcgggagcctgtggagcctgtggaggctgcgggagcctgtggagcctgtggagcctgccagcccagtgccctcaggcagcaaagcccagcagtcactggtcccccaaggccgcccacagatctatgcaaggtgatgcagcaggggctatggacccacccacacccaagcagggaggcacgatgacaaggcccgggcaggtagggggacatccggaaagcaggctcagctccacccctgagaaatttccgtctaaatccaggagatccttgattcagcaagaaccttccctcatgtccgaggctgttaaacctaaagccagttagggcagaggtcagaggggtggaccaggagcaagtgggtcgagggtgagcaagtgttgggagtggggatagaaactccatccatctccgactgctctgctcgcatatctgctccagggcccacctggtatgtcagagggaattagaacggccttgtgaggaggctcaggagaagggctcctgtgcccaccggccaggtcagcactggcctaacgccaccacagcaaagcccctcagtgcagagggcccagctatacggaactgggcattgcttagcctggagggaataggcagctgaggagacctggaaaacacagtcatgaagagactggccatgaagacccacagaccctgcgagccaaggccttgcgtgccatgcagctgcagctctaccagcctggacccaacctcaggccgacatccagcagggaacatgttactaaggccagttgtagaagggacttctctggacacatgccctactctcccaaaagacttaagcacaggccagtcccaaaggcagaagaatggactaaatgagctcttgtggccccagccctaagattctagaggactctctgaaacttcacttgaagacttgacctctgagtgcaactggagtcacagccactcaggagaaagggcaggctatgcaagcacgtgcttcaggagcatcctggtgaggtcttcagctctgacagagcaacccctctgctgctaccctcactgggggcagccatctgagtcttaaggagttgcttattttttaggtccaaacataaaattcaactcccctgggatcacgtatacagacaggcctatagcaccttattatcaggtaccatcctagtgtggaagtcccctgacctgtgtgctctgtgggatgggaatgtcccttgtcatcaatgtgtccccaggaactagaacagtgcctggcacacaacagatgccgttaaatgaataagtgaatgactcctgcagttaggctctgggtggggggagctgagtgtgaggagtggggagtacaggagaaaggaaagtggggattagtagaggaagtggtcaggtgagtcaatgcttcacagttttgccaagagctaaagtaacttgtcaagaacttcagaacaaggaaagcctgagtggtggccccttgctcagggcagcccccaggcaggcacacatctatccaacaaagcctggaggacagggactgtggtaaatcacgcagggtacctgggagtctgacctcactgtgtgaccacactgaggtccagagccaacagtcactttatgtgggttcgcctcagtttctccatgagtcctactctaaaacccatctacctccgtgagccatgtgtgggaagacgagcttctgactgggatgagtctgggggagcaagcacatggagacccagtgctgtcattctggctgccggaaggctgcaggaccaccagcgccctgcgtctgtgtcaaggccacctgggcaacgcggcgaggggtggggagtgcaggcctcctttcacacagagacacacaggcctgaggcctctctgggtagcacacatagagctatattttgcaattaataaacaggtcagacattgagtcagtagccacaagtagaacaggaagtggaaaaagtctcccacttccctccaggtgtttgggggctggggcggtcccctcccatttccatgacgtcatggttaccaagaggggcaagtagggcaccctttgaagctctcccgcagaagccacatcctctggaaagaagagtttaaaatactgagttagagatagcatcgccccaggccacgtgccgaggggagcaggctgggccgttacaccaccccccaaccgcaggtgcagcaaggccaacatgccaggctgggaggggctgccggcccctcggtgacttgcaccgggcccgcagtcaggctggggaggtgctgctggccccaccgctgagccgcctccctcaccgcacctctgctgcccctccaaaccagccaagatcagaccttgatctcacctgattaagcgcttgcttagtacagggcagaccctcgagacttatgctcaggccagtgtctcctgggagggagggaggtggggaggccgtatttgcccccacacagagctagggctgattctctgagggacccccccccaatagcacctccccccttaccctgatgcttgtccattaggtgatggccctaatggacgccttgatggacacgtccgggacccagggacccggagaccaggaatctgcaggtctcagggagccgcagaacctgaaacccaaaaataccaggcttgatcgcctgctcttcggtagtgtcgccatccacccgcatgggggcagcagcgctccaccaaaaagacctcttctccctttgtctgttaattctggagatagaaagcccccaaagtttaggaaaagctcttttccgaggaaaataaaagggcaggtgacttttatcccacaagtccctgccctgtgcccgtcactgcgctgggcgcaaggcctgtgtcatcctgtcacatccccccgaaaggagaggagggcctggggcctgggccggcagcagggggcgctgttcgtccgggatcgtcagacccgctccacccggagccccggaggaagtgcccagggagggctgggggcccggaggaggccttgggttcggaattaggctggctggagtccgggatcc

SEQ ID NO: 29026 - DNA, 1750 bp, Homo Sapiens
cctacaggtgaaaagcccagcgacccagtcaggatttaagtttacctcaaaaatggaagattttaacatggagagtgacagctttgaagatttctggaaaggtgaagatcttagtaattacagttacagctctaccctgcccccttttctactagatgccgccccatgtgaaccagaatccctggaaatcaacaagtattttgtggtcattatctatgccctggtattcctgctgagcctgctgggaaactccctcgtgatgctggtcatcttatacagcagggtcggccgctccgtcactgatgtctacctgctgaacctagccttggccgacctactctttgccctgaccttgcccatctgggccgcctccaaggtgaatggctggatttttggcacattcctgtgcaaggtggtctcactcctgaaggaagtcaacttctatagtggcatcctgctactggcctgcatcagtgtggaccgttacctggccattgtccatgccacacgcacactgacccagaagcgctacttggtcaaattcatatgtctcagcatctggggtctgtccttgctcctggccctgcctgtcttacttttccgaaggaccgtctactcatccaatgttagcccagcctgctatgaggacatgggcaacaatacagcaaactggcggatgctgttacggatcctgccccagtcctttggcttcatcgtgccactgctgatcatgctgttctgctacggattcaccctgcgtacgctgtttaaggcccacatggggcagaagcaccgggccatgcgggtcatctttgctgtcgtcctcatcttcctgctttgctggctgccctacaacctggtcctgctggcagacaccctcatgaggacccaggtgatccaggagacctgtgagcgccgcaatcacatcgaccgggctctggatgccaccgagattctgggcatccttcacagctgcctcaaccccctcatctacgccttcattggccagaagtttcgccatggactcctcaagattctagctatacatggcttgatcagcaaggactccctgcccaaagacagcaggccttcctttgttggctcttcttcagggcacacttccactactctctaagacctcctgcctaagtgcagccccgtggggttcctcccttctcttcacagtcacattccaagcctcatgtccactggttcttcttggtctcagtgtcaatgcagcccccattgtggtcacaggaagcagaggaggccacgttcttactagtttcccttgcatggtttagaaagcttgccctggtgcctcaccccttgccataattactatgtcatttgctggagctctgcccatcctgcccctgagcccatggcactctatgttctaagaagtgaaaatctacactccagtgagacagctctgcatactcattaggatggctagtatcaaaagaaagaaaatcaggctggccaacgggatgaaaccctgtctctactaaaaatacaaaaaaaaaaaaaaaaattagccgggcgtggtggtgagtgcctgtaatcacagctacttgggaggctgagatgggagaatcacttgaacccgggaggcagaggttgcagtgagccgagattgtgcccctgcactccagcctgagcgacagtgagactctgtctcagtccatgaagatgtagaggagaaactggaactctcgagcgttgctgggggggattgtaaaatggt

SEQ ID NO: 29027 - DNA, 2273 bp, Homo Sapiens
gggggcagatcctggggagaatggaggagcacacagaggcaggctcggcaccagagatgggggcccagaaggccctgattgacaatcctgctgacatcctagtcattgctgcatatttcctgctggtcattggcgttggcttgtggtccatgtgcagaaccaacagaggcactgtgggcggctacttcctggcaggacgcagcatggtgtggtggccggttggggcctctctcttcgccagcaacatcggcagtggccactttgtgggcctggcagggactggcgctgcaagtggcttggctgttgctggattcgagtggaatgcgctcttcgtggtgctgctactgggctggctgtttgcacccgtgtacctgacagcgggggtcatcacgatgccacagtacctgcgcaagcgcttcggcggccgccgcatccgcctctacctgtctgtgctctcccttttcctgtacatcttcaccaagatctcagtggacatgttctccggagctgtattcatccagcaggctctgggctggaacatctatgcctccgtcatcgcgcttctgggcatcaccatgatttacacggtgacaggagggctggccgcgctgatgtacacggacacggtacagaccttcgtcattctggggggcgcctgcatcctcatgggttacgccttccacgaggtgggcgggtattcgggtctcttcgacaaatacctgggagcagcgacttcgctgacggtgtccgaggatccagccgtgggaaacatctccagcttctgctatcgaccccggcccgactcctaccacctgctccggcaccccgtgaccggggatctgccgtggcccgcgctgctcctcggactcacaatcgtctcgggctggtactggtgcagcgaccaggtcatcgtgcagcgctgcctggccgggaagagcctgacccacatcaaggcgggctgcatcctgtgtgggtacctgaagctgacgcccatgtttctcatggtcatgccaggcatgatcagccgcattctgtacccagacgaggtggcgtgcgtggtgcctgaggtgtgcaggcgcgtgtgcggcacggaggtgggctgctccaacatcgcctacccgcggctcgtcgtgaagctcatgcccaacggtctgcgcggactcatgctggcggtcatgctggccgcgctcatgtcctcgctggcctccatcttcaacagcagcagcacgctcttcaccatggacatctacacgcgcctgcggccacgcgccggcgaccgcgagctgctgctggtgggacggctctgggtggtgttcatcgtggtagtgtcggtggcctggcttcccgtggtgcaggcggcacagggcgggcagctcttcgattacatccaggcagtctctagctacctggcaccgcccgtgtccgccgtcttcgtgctggcgctcttcgtgccgcgcgttaatgagcagggcgccttctggggactcatcgggggcctgctgatgggcctggcacgcctgattcccgagttctccttcggctcgggcagctgtgtgcagccctcggcgtgcccagctttcctctgcggcgtgcactacctctacttcgccattgtgctgttcttctgctctggcctcctcaccctcacggtctccctgtgcaccgcgcccatccccagaaagcacctccaccgcctggtcttcagtctccggcatagcaaggaggaacgggaggacctggatgctgatgagcagcaaggctcctcactccctgtacagaatgggtgcccagagagtgccatggagatgaatgagccccaggccccggcaccaagcctcttccgccagtgcctgctctggttttgtggaatgagcagaggtggggtgggcagtcctccgccccttacccaggaggaggcagcggcagcagccaggcggctggaggacatcagcgaggacccgagctgggcccgtgtggtcaacctcaatgccctgctcatgatggcagtggccgtgttcctctggggcttctatgcctaagaccaactgcgttggacaccataagccacagcctcacaggaagtgggggtgaggagcctgcggtgctccccagaaaaggggaaggggcagtggggtgagaaggtcctggctccccttctcccggccttcctctgcctggggcccactgcatctgattggcagtcacttcccatgagggcctggcccacccgctgcagttgccctaaggaaaaataaagctgcctttcccctgta

SEQ ID NO: 29028 - DNA, 4519 bp, Homo Sapiens
cagccagggccaccccaggggctataagagcaactagatttctggagcagctcggggatgggtgccatttgagcccagcttggctccccctcctggctggcctccttcctgcccttctgcctgcctgtgtctgctgagattctgcaaagaggaacgttggcaccatgtctctgctcaaccctgtcctgctgccccccaaggtgaaggcctatctgagccaaggggagcgcttcatcaaatgggatgatgaaactacagttgcctctccagttatcctccgtgtggatcctaagggctactacttatactggacgtatcaaagtaaggagatggagtttctggatatcaccagcatccgggatactcgctttgggaagtttgccaagatgcccaagagccagaagctccgggacgtcttcaacatggactttcctgataacagtttcctgctgaagacactcacggtggtgtccggcccggacatggtggacctcaccttccacaacttcgtctcctacaaggagaacgtgggcaaggcctgggctgaggacgtactggccctagtcaaacatccgctgacggccaacgcctcccgcagcaccttcctggacaagatccttgtgaagctcaagatgcagctcaactctgaagggaagattccggtgaagaactttttccagatgtttcctgctgaccgcaagcgggtggaagctgctctcagtgcctgccacctccccaaaggcaaaaatgacgccatcaatcctgaggacttcccagaacctgtctacaagagtttcctcatgagcctctgtcctcggccagaaatagatgagatcttcacttcttaccatgctaaggccaaaccctacatgacgaaggagcacctgaccaaattcatcaaccagaaacagcgggactcccggcttaactccctgctgttcccgccagcacggcctgaccaggtgcagggcctcatcgacaagtatgagcccagtggcatcaatgcacagaggggccagctgtcacctgaaggcatggtctggtttctctgtgggccagagaacagcgtgctggcccaggacaagctgctgctccaccacgacatgacgcagccactcaatcattacttcatcaactcgtcccacaacacctacctgacagccggccagttctcaggcctctcctcggctgagatgtaccgccaggtgctgctctctggctgccgttgcgtggagctagactgctggaaggggaaaccccctgacgaggagcccattatcacccatggcttcaccatgaccacagacatcttcttcaaagaagcaattgaggctattgcagaaagtgcctttaagacctccccctatcccatcatcctgtcgtttgagaaccatgtggactcaccccgccagcaggctaagatggctgagtattgccggacgatctttggggatatgctgctcacagagcccctggaaaagttcccactaaaaccaggtgtccccctgcccagccctgaggatctcaggggcaagatcctcatcaagaacaagaagaaccagttttctggccccacctcctccagtaaggataccggtggggaggctgagggcagcagcccacccagtgcccctgcagtgtgggctggcgaggaagggactgagctggaggaggaggaggtggaagaggaagaggaggaggagtcaggaaacctggatgaagaagagattaagaagatgcagtcggatgagggcacagcgggcctggaagtgacggcttatgaggagatgtccagcctagtcaattacatccagcccaccaagttcgtctcctttgagttctctgcccaaaagaaccgaagttatgtcatctcgtccttcacagagctcaaggcatatgacctgctctccaaggcctcggtgcagtttgtggactacaacaagcgccagatgagccgcatttaccccaagggaacccgcatggactcctccaactacatgccccagatgttctggaatgctggatgccagatggttgccctcaacttccagacgatggacttgcccatgcagcagaacatggcagtatttgagttcaacgggcagagcggctacctcctcaagcatgagttcatgcgccggccggacaagcagttcaaccccttctcagtggaccgcatcgacgtggtggtggccaccaccctttccattacggtgatctctgggcagttcctgtcagaacgcagcgtgcgcacctatgtagaagtggagctgtttggccttcctggggaccccaagaggcgctatcgaactaagctgtcacccagtactaactccatcaatcctgtctggaaggaggagccctttgtctttgagaagatcttgatgcctgagctggcctccctcagagtggctgtgatggaggaaggcaacaagtttcttggacaccgcatcatccccatcaatgccctaaattctgggtaccaccacctgtgcctgcacagtgagagcaacatgcccctcaccatgcctgcgctcttcatcttcctggagatgaaggactacatacctggtgcttgggcagatctcactgtggccctcgccaaccccattaagttcttcagtgcccatgacacgaagtctgtgaagctcaaggaggccatgggaggtctgcctgagaagcccttcccactggcgagtccagttgccagccaggtcaatggggcgttggccccaacgagcaatgggtcaccagcagccagggccggggccagggaagaggctatgaaagaagctgcggagccgcggaccgccagcctggaggagctccgggagctaaagggcgtggtgaagctgcagcggcggcacgagaaggagctgcgagagttggagcggcgcggagcgcggcgctgggaggagctgctgcagcggggcgcggcgcagctggcggagctcgggccaccgggcgtggggggcgtcggggcctgcaagctcggtcccggcaagggctctcgcaagaagaggagcctgccccgcgaggagagcgccggagccgcgccgggcgagggccctgagggcgtggacgggcgcgtgcgggagctgaaagacaggctggagctggagctgctgcggcagggcgaggagcagtacgagtgcgttctgaagcgcaaggagcagcacgtggccgagcaaatctccaaaatgatggagctggccagagagaaacaggcggcagagctgaaggccctgaaggagacgtcggagaacgacaccaaagagatgaagaaaaagctggagacaaagagactggagcggatccagggcatgaccaaagtcaccacagacaagatggcccaggagaggttgaagagagagattaacaactcccacatccaggaagtagtgcaggtgatcaagcagatgacggagaacttggagaggcaccaggagaagctggaggagaagcaggcggcttgcctggaacagatacgggagatggaaaagcagttccagaaggaggcgctggcagagtacgaggccaggatgaagggtctggaggcagaggtgaaggagtcggtgagggcctgcctcaggacctgctttccctccgaggccaaggacaagcctgagagggcctgcgagtgccccccagagctgtgtgagcaggacccactcatagcaaaggcagatgcccaggagagccgcctctgatgcccccatcccactgggacatttagcaaggaggttcagccccttctctgggatgtggttctattcccccaggaaaaaggagccccagccttctgaggctgtgggaacctgtggctgccttggacgctgcagccccctcctcaacggccaggccagagtctgagacaggacccaggcaccctcacggcagggcctctctggggcctagaagtcttctcaagctgacttcctacctccccctccatctctagataagtgtcatatatttgttgagggcaaaagactatggactggaaggcagaaagtgggatcctggccccactctgcctttcctattgagcaaccagctctgggctcagtttcctcacctggagggttggacccactcacctccactctagccccgaaccctcctgccccaggcttccaggccccatcaggcctgccctgagttggccttgtccactccttgaggcagatcctggcactacctcacagctccctggggacggccactccctggctgagggccctcccctcccctctgcctgtccggaacgggaggctgaaatggaaaagctgccttggccctgcttggctgagtcacaaggggcagtgggctcttgggtgctgttccaccctgaccctggctcacccctcttcctaggcctgggggcaggcagttcctaccatgtacccctctcaggctgcctgcctgacaaggtcagcatcatttgctctcctgaatttatgaggtttatttatttttctctttcctactcctattaaagaacctcgtcccagtgaaa

SEQ ID NO: 29029 - DNA, 3657 bp, Homo Sapiens
gactctgcgtcagtcagtgaaatctttttatgagcggttgaatgaggaattttaatccgcaaagaggttcagtttgcctgaaccccctacttgaatggctagacgctggcgttacgcacaccttcagacagcgcggcgcacaatcccaataccccatcgatggcttgctggtcgtttttcgcattggcgatgtgatcgatcagtgccgaacccaccaccacgccgtccgccaaccgtgcgatggccgctgcttgttccggagtgcgaataccaaaaccgatgctgatcggcaggtcggtatgccgacgcaggcgagccaccgcctcttcgacgtgttccagggtggcggcaccggcaccggtcacaccggccaccgacacgtagtacacaaagccggagctgccgttgagcacggtcggcaggcgtacgtcgtcggtagtcggtgtggtcaggcggataaagtcgatgccggcggcctgggccgggtcgcacagctcgccgttatgctcaggcggcatgtcgaccacgatcaggccatcgacgccggcttccttggcgtcggcgataaactttggcacgccatatttgtggatcgggttgaagtagcccatcaacaccagcggggtgtcgttgttgcccttgcggaactcgcggaccatttgcagggttttgagcaggttttgcttggcttccagtgcgcggatgttggccagctggatcgccgggccgtcggccatcgggtcggtgaagggcatgcccagctcgatcacgtcggcgccagccgctggcaagcctttgaggatcgccagcgaggtgtcatagcccgggtcgccggcggtgacgaaagtcaccagggcggcgcggttttgttctttgagttggtcaaagcgggtttgcaggcggctcatcagtgtttctcctgcttggtggtttccatgtggtgcatcacggtctgcatgtctttgtcgccacggccggacaggttgaccaccatcaggtgatccttcggcagggtcggtgcgcgtttgaacacttcggccagggcgtgggcgctttccagtgcaggaataattccttccaggcggcagcatttgtggaacgcatcgagggcttcgtcatcggtcaccgaggtgtactggacgcggccgatgtcatgcaaccaggcgtgttccgggccgatgccagggtagtccaggccggcggaaatcgagtgggcgtcgatgatctggccatcgtcgtcctgcaacaggaaggtacggttgccgtgcaatacgccaggtacgccgccgttgaggctggcggcgtgcttgccggtttcgatcccgtggccagccgcttcaacgccgatgatctcgacgcttttgtcatccaggaacgggtgaaacagccccatggcattggaaccgccaccgatgcatgccaccaggctgtccggcaggcggccttcctgggcttgcagttggtcgcgggtttccttgccgatcacggcctggaagtcgcgcaccatcgctgggtacgggtgtgggccggctacggtgccgatcaggtagaaggtgtcttcgacgttggtgacccagtcgcgcagggcttcattcatcgcgtctttcagggtgccggtgccggcgaccaccgggatcacttcggcgcctagcagcttcatgcggaacacgttggcctgttggcgttcgatgtcggtggtgcccatgtagatcacgcattgcaggccaaaacgcgcggccacggtggcagtggctacgccgtgcatgccggcgccggtctcggcgatgatgcgttttttgcccatgcgccgcgccagcaggatctggccgatgcagttgttgatcttgtgcgcgccggtgtggttcagctcttcgcgcttaaggtagatcttggcgccgccgcagaattcggtgaggcgttcggcgaaatacagtgggcttgggcggccgacgtagtcgcgctggaagtaagccagttcttctttgaaggcaggatcttccttggccgcttcgtattcgcgggccaggtcgaggatcaacggcatcagggtttcagcgacgtaacggccgccgaacgcgccaaacataccggtggcgtcagggccgttgcgtagatcggtctgggactgagtcatgggacgctccagggaagaaagtgtgtaagaaacaatgagggccactctacccctcacggtgtaggctgaaaaccgataagatcgccgcaacctgtcaggaaaactcacagatgagccgagacctcccgcccctcaatgccctgcgtgcgtttgaagcgactgcgcgccttaacagcgtcagccaagccgctgagcaattgcacgtgactcacggtgccgtgagtcggcagttgaaggtgttggaagaacacttggggatcagcttgttcgtgaaagacgggcgcggccttaaactcacagatgcaggtgcccggctgcgggatgccagtgccgaggccttcgagcgtctgcgggatgtctgcgcggagcttacccagagcagcgccgatgcaccgttcgtgctggggtgttcgggcagtctgctggcgcgctggttgatcccgcgtctcgggcgattgaatgcagacctgccggatttgcgtctgcacttgtcggccggtgacggcgatctggaccccaggcgccccggtctagacgctcttctggtatttgccgaaccaccgtggccggcggatatgcaggtatatgagctgaccagcgaacgtatcggcccggtcatgagcccgcgatttgcgggttatgagcgcttgagccatgcgcctgccgcagccttgtgtggtgaagcgttgttgcacaccacctcacgcccgcaagcctggcccagttgggcacagcaacacggcatcgagcctggcgcgttgaaacacggccaagggttcgagcatctctattatttgctggaggcagcggtagcagggttgggcgtggcaattgcgcccgagccgctggtggccgaggacttacgcgcgggtcgcctggtagcgccgtggggtttcagcgaaacaccggcgcacctggcgttgtggctgcccaacgcgcgccgcgatgggcgcgcagggcaattggcgcagtggctcaaggctgagctgttgcgccaaccctattagtcaccgcgtttgcacagcaagtacgcagccagcaggcccagtgcaccaacggccacaccggctgtagtccatgggtgctcctgtgcgtagtcccgggtcgcaacaccggtttcgcggattttgactttgctttcttcgtaggcatcgctgatcaggtggcgggaatgcttgagcgcgttctcggcattgcttttcagggccttcaaggttttgcgcgactcgtcagacgcatcgtccttgaggctttccagagacttgagcaggctcgaaatctcggcttccatgctttccagtgacgctttgcgtaaagaagtgttggccatgtggactctcctgaagtgattgagtggcgtgtgtagataccgactactgccgtttcagaaagtgcagtaaatctgaactttcaggtaggaacagccgccagaagcagtaagaacattgactgctacgcttgattcacgaccctcttgatttacgacccttaggagaactgccatgagtgatcatcacacgtac

SEQ ID NO: 29030 - DNA, 3132 bp, Homo Sapiens
cggatcgcagctctcgcggcagtcgcctgagacttaaggttattgcttggccgcggcctggtattccggcgattcgtttcttgctcggcttcctggagctgtggtccgtgtgggcttccacctcagacagttgcgctggctcagcggggccggaacatggctgcgtccggtctggatcatctcaaaaatggctacagaagaagattttgtcgaccttccagggcacgtgacattaacacagagcaaggccagaatgttctggaaatcttacaagactgttttgaagaaaaaagtcttgccaatgattttagtacaaattctacaaaatcagtgcctaattcaacacgcaaaataaaagacacttgtattcagtcaccaagcaaagagtgccagaaatcacatccaaagtcagttccagtttcttcaaagaagaaagaagcctctctacagtttgttgtagaaccaagtgaagccacaaacagatcagttcaggcccatgaagttcatcagaaaattctggcaactgatgttagttccaaaaatacacctgactcgaaaaaaatatcaagtagaaacataaatgatcatcacagtgaagctgatgaagaattttacttatccgttggctcaccttctgttcttttggatgcaaaaacatctgtatcacaaaatgttattccatctagtgccaaaaagagagagacttacacttttgaaaattcagtaaatatgctgccttcaagtacagaggtttcagttaaaaccaaaaaaaggttaaactttgatgataaagttatgttaaagaaaatagaaatagataataaagtatcagatgaagaggataaaacatcggaaggacaagaaagaaaaccatcaggatcatctcagaatagaatacgagattcagaatatgaaattcaacgacaagctaaaaaaagtttttcaacattgtttttagaaacagtaaaacgaaaaagtgaatccagtcccattgttaggcatgcggcaactgctccacctcattcgtgtcctcccgatgatacgaagttgatagaggatgaatttataattgatgagtcggatcaaagttttgccagtagatcttggattacaataccaagaaaggcagggtctctgaaacaacgcacaatatccccggctgagagcactgcactctttcaaggtagaaagtcaagagaaaagcatcataatatattacctaagactttggcaaatgacaaacattcccataaacctcacccagtagagacatctcagccctctgataaaacagtactggatacaagttatgctttgatagatgaaacagtaaataattatagatctacaaaatatgaaatgtattccaagaatgcagaaaaaccatctagaagcaaaaggactataaaacaaaaacagagaagaaaattcatggctaaaccagctgaagaacagcttgatgtgggacagtctaaagatgaaaacatacatacatcacatattacccaagacgaatttcaaagaaattcagacagaaatatggaagagcatgaagagatgggaaatgattgtgtttccaaaaaacagatgccacctgtgggaagcaagaaaagtagcactagaaaagataaggaagaatctaaaaagaagcgcttttccagtgagtccaagaacaaacttgtacctgaagaagtgacttcaactgtcacgaaaagtcgaagaatttccaggcgtccatctgattggtgggtggtaaaatcagaggagagtcctgtttatagcaattcttcagtaagaaatgaattaccaatgcatcacaatagtagccgaaaatctactaagaaaacaaatcagtcatctaagaatattaggaaaaaaactattccacttaaaaggcagaagacagcaactaaaggcaaccaaagagtacagaagtttttaaatgctgaaggttctggaggtatcgttggtcatgatgaaatttccagatgttcactgagtgagccattggaaagtgatgaggcagacttggctaagaagaaaaatcttgattgttctagatctacaagaagctcaaagaatgaagataacattatgactgcacagaatgttcccctaaagcctcagaccagtggatatacatgtaatataccaacagagtcaaacttggattctggagagcataagacttcagttttagaggaaagtggaccttccaggctcaataataattatttaatgtctggaaagaatgatgtggatgatgaggaagttcatggaagttcagatgactcaaaacaatctaaagtgataccaaagaacagaatccatcacaaactagtattgccctccaacacaccaaatgttcgcaggaccaagagaacacgtttgaaacctttggagtactggcgaggagagcgaatagattatcaaggaaggccatcaggaggattcgtgattagtggagtactatctccagacacaatatcgtctaaaaggaaggcaaaagaaaatattggaaaagtcaacaaaaaatctaataagaaaaggatctgtcttgataacgatgaaagaaagactaacttaatggtaaatctaggtatacctcttggagatcctttgcagccaacgagggtaaaggacccagaaacaagagagattattctcatggatcttgtaaggccacaagatacatatcaattttttgttaagcatggtgagttgaaggtatacaagacattggatacaccctttttttctactgggaaattgatattaggaccacaagaagaaaagggaaagcagcatgttggccaggatatattggttttttatgttaactttggtgaccttttgtgtactttacatgaaacaccttatatattaagtactggggattcgttctatgttccttcaggtaactattataacatcaaaaatctccggaatgaggaaagtgttcttctttttactcagataaaaagatgaaagatcaaccaaccttaaatatatgtatgtatatatgtatatgtaaaaacagtttgtatagttggaatatttgtctttgtaattacttgtgatgttttaaaataaaaattttattcagttttgtgtaaaaaaaaaaaaaaaaaa

SEQ ID NO: 29031 - DNA, 3913 bp, Homo Sapiens
ctcggcgcgcctggacccctgcccctctctgggtggagaagctcccggccgcttcccggtttcactccttctcagcctgggctcccagcccctctctccttttcctggactggctctcacccccttcggtccccttcctttagctcaggctccctaccccttcctttagcccacagcccagagtcccagctcctcagtcactttcctcagccaaaggtcccagccttccttcttcctttcctttgcactatccctatcctgccccttcctctatccctagggctcagtttcccacatccgtcctcccccttcccaggcccggagttccagaccttttggtctcctttcgtggtcgttcctgggtccttgccccctttccccactttggagttccagattgcaaacccagcctccctccacccccagaaaattgcttccatggaaatgcctctctaaaacatgaacttttcctagagactacgccagtctctcttcccacttgctgaccctttgctacctatgtgcccggttttactctcatttgggtaaggtcgaggctggctctggaagcagcaccatggttctgcggtctggcatctgtggcctctctccacatcggatcttcccttccttactcgtggtggttgctttggtggggctgctgcctgttctcaggagccatggcctccagctcagcccaactgccagcaccattcgaagctcagagccaccacgagaacgctcgattggggatgtcaccaccgctccaccggaggtcaccccagagagccgccctgttaatcattccgtcactgatcatggcatgaagccgcgcaaggcctttccagtcctgggcatcgactacacacacgtgcgcacccccttcgagatctccctctggatccttctggcctgcctcatgaagataggtttccatgtgatccccactatctcaagcatcgtcccggagagctgcctgctgatcgtggtggggctgctggtggggggcctgatcaagggtgtaggcgagacaccccccttcctgcagtccgacgtcttcttcctcttcctgctgccgcccatcatcctggatgcgggctacttcctgccactgcggcagttcacagaaaacctgggcaccatcctgatctttgccgtggtgggcacgctgtggaacgccttcttcctgggcggcctcatgtacgccgtgtgcctggtgggcggtgagcagatcaacaacatcggcctcctggacaacctgctcttcggcagcatcatctcggccgtggaccccgtggcggttctggctgtctttgaggaaattcacatcaatgagctgctgcacatccttgtttttggggagtccttgctcaatgacgccgtcactgtggtcctgtatcacctctttgaggagtttgccaactacgaacacgtgggcatcgtggacatcttcctcggcttcctgagcttcttcgtggtggccctgggcggggtgcttgtgggcgtggtctacggggtcatcgcagccttcacctcccgatttacctcccacatccgggtcatcgagccgctcttcgtcttcctctacagctacatggcctacttgtcagccgagctcttccacctgtcaggcatcatggcgctcatagcctcaggagtggtgatgcgcccctatgtggaggccaacatctcccacaagtcccacaccaccatcaaatacttcctgaagatgtggagcagcgtcagcgagaccctcatcttcatcttcctcggcgtctccacggtggccggctcccaccactggaactggaccttcgtcatcagcaccctgctcttctgcctcatcgcccgcgtgctgggggtgctgggcctgacctggttcatcaacaagttccgtatcgtgaagctgacccccaaggaccagttcatcatcgcctatgggggcctgcgaggggccatcgccttctctctgggctacctcctggacaagaagcacttccccatgtgtgacctgttcctcactgccatcatcactgtcatcttcttcaccgtctttgtgcagggcatgaccattcggcccctggtagacctgttggctgtgaagaaaaagcaagagacgaagcgctccatcaacgaagagatccacacacagttcctggaccaccttctgacaggcatcgaagacatctgtggccactacggtcaccaccactggaaggacaagctcaaccggtttaataagaaatatgtgaagaagtgtctgatagctggcgagcgctccaaggagccccagctcattgccttctaccacaagatggagatgaagcaggccatcgagctggtggagagcgggggcatgggcaagatcccctctgccgtctccaccgtctccatgcagaacatccaccccaagtccctgccttccgagcgcatcctgccagcactgtccaaggacaaggaggaggagatccgcaaaatcctgaggaacaacttgcagaagaccaggcagcggctgcggtcctacaacagacacacgctggtggcagacccctacgaggaagcctggaaccagatgctgctccggaggcagaaggcccggcagctggagcagaagatcaacaactacctgacggtgccagcccacaagctggactcacccaccatgtctcgggcccgcatcggctcagacccactggcctatgagccgaaggaggacctgcctgtcatcaccatcgacccggcttccccgcagtcacccgagtctgtggacctggtgaatgaggagctgaagggcaaagtcttagggttgagccgggatcctgcaaaggtggctgaggaggacgaggacgacgatgggggcatcatgatgcggagcaaggagacttcgtccccaggaaccgacgatgtcttcacccccgcgcccagtgacagccccagctcccagaggatacagcgctgcctcagtgacccaggcccacaccctgagcctggggagggagaaccgttcttccccaaggggcagtaacgccagggccagcaggcagcgcctgtcccctcacagactcttccaccagagcaggggctgctgggggctccccttgcccttcctgacccggattggccctgcccctccccctaccgcatggcagctgggcccacagcccccaccccagcacagctcctcccctgccgcctcccgggaagcatcctccccaccagagctgcctccccaatccatttggcagaactgctggggctggtgaggccggccctgcccctccctagatccaggcttctcccggacctggactagggcctcggaggctcctccctctgcctcatcctcctcctcattcagaccaatcttagtttctaaccaaagagtctctggctcagctgtggtcccacccaggaagggagggagctgaggcctcccttgagtaggccctgctttatcaggggacaaaccaggggtaccaggcacatggctgggggagggactgctgacccaccaaggtctcacactcctcctgccagctctgtcaccctggccaccacccaacctatccttactcagagctgcgggctgagggcatctctgagtgtctctgcctggagcaggggtggtttctacggtgacagtgacgtgactcagagcttttcgaactgtgctcccacggggaccactgggcccctcaggggaagctgctaggggaaggactggccgtggctccagaatgtgctgcctttttaagttttgtttgttcacactcctatatatgattgtttgcacagagggcgctcctgtttttaaaacattttgaaaacccctggctgaacagtgctctgcctctaactccctcctcacactccagaattacccttcctcatctgtgcctgtctgtccaacccc

SEQ ID NO: 29032 - DNA, 2472 bp, Homo Sapiens
ttcaccgtctttgtgcagggcatgaccattcggcccctggtagacctgttggctgtgaagaaaaagcaagagacgaagcgctccatcaacgaagagatccacacacagttcctggaccaccttctgacaggcatcgaagacatctgtggccactacggtcaccaccactggaaggacaagctcaaccggtttaataagaaatatgtgaagaagtgtctgatagctggcgagcgctccaaggagccccagctcattgccttctaccacaagatggagatgaagcaggccatcgagctggtggagagcgggggcatgggcaagatcccctctgccgtctccaccgtctccatgcagaacatccaccccaagtccctgccttccgagcgcatcctgccagcactgtccaaggacaaggaggaggagatccgcaaaatcctgaggaacaacttgcagaagaccaggcagcggctgcggtcctacaacagacacacgctggtggcagacccctacgaggaagcctggaaccagatgctgctccggaggcagaaggcccggcagctggagcagaagatcaacaactacctgacggtgccagcccacaagctggactcacccaccatgtctcgggcccgcatcggctcagacccactggcctatgagccgaaggaggacctgcctgtcatcaccatcgacccggcttccccgcagtcacccgagtctgtggacctggtgaatgaggagctgaagggcaaagtcttagggttgagccgggatcctgcaaaggtggctgaggaggacgaggacgacgatgggggcatcatgatgcggagcaaggagacttcgtccccaggaaccgacgatgtcttcacccccgcgcccagtgacagccccagctcccagaggatacagcgctgcctcagtgacccaggcccacaccctgagcctggggagggagaaccgttcttccccaaggggcagtaacgccagggccagcaggcagcgcctgtcccctcacagactcttccaccagagcaggggctgctgggggctccccttgcccttcctgacccggattggccctgcccctccccctaccgcatggcagctgggcccacagcccccaccccagcacagctcctcccctgccgcctcccgggaagcatcctccccaccagagctgcctccccaatccatttggcagaactgctggggctggtgaggccggccctgcccctccctagatccaggcttctcccggacctggactagggcctcggaggctcctccctctgcctcatcctcctcctcattcagaccaatcttagtttctaaccaaagagtctctggctcagctgtggtcccacccaggaagggagggagctgaggcctcccttgagtaggccctgctttatcaggggacaaaccaggggtaccaggcacatggctgggggagggactgctgacccaccaaggtctcacactcctcctgccagctctgtcaccctggccaccacccaacctatccttactcagagctgcgggctgagggcatctctgagtgtctctgcctggagcaggggtggtttctacggtgacagtgacgtgactcagagcttttcgaactgtgctcccacggggaccactgggcccctcaggggaagctgctaggggaaggactggccgtggctccagaatgtgctgcctttttaagttttgtttgttcacactcctatatatgattgtttgcacagagggcgctcctgtttttaaaacattttgaaaacccctggctgaacagtgctctgcctctaactccctcctcacactccagaattacccttcctcatctgtgcctgtctgtccaacccctcccccacgtctctctgcctgctgggctcttaactgttgctcgaagactgtgacatcagaagtaactcccactcctaatcaagagtctctccagcctcacagatgctggcctcttggcacctgcctagctcttgggcctgacctccagtcctgctggcctgctcttacttcccccaccctgggtttggcccctggaacctttcccttgtgtgtaccacaccctgcctgctgtggagcccattgtggaggcggtgggggggagaaggcctcccctgaggatcccctgtcccctggggctggtggattgggcagaatcctgggcccccagagacctttgcccacacacactccttccccttgtccctggggcactcccccaggattgtgcaatagtcagagtgtccctttttgcaggggactgggccatgggtcctcggcccatctgtccatcctcctctccatgcaagtgctgtttgggcaggagtcaccatgcaagggtgacatcgacaaccacgtaccaagccaccgcagctgctgccactctgctgcctgtacagaagaaactgaatctttttcatattctaataaatcaatgtgagtttt

SEQ ID NO: 29033 - DNA, 2217 bp, Homo Sapiens
cgggccatcgccgggcgacgacgaggaggaggcggccgccgcagccggggcccccgccgccgccggagcgacaggtgatttggcttctgcacagttaggaggagcaccaaaccgatgggaggttttgtcagccacacctacaactataaaagatgaagctggtaatctagtccagattccaagtgctgctacttcaagtgggcagtatgttcttccccttcagaatttgcagaatcaacaaatattttccgttgcaccaggatcagattcatcaaatggtacagtgtccagtgttcaatatcaagtgataccacagatccagtcagcagatggtcagcaggttcaaattggtttcacaggctcttcagataatgggggtataaatcaagaaagcagtcaaattcagatcattcctggctctaatcaaaccttacttgcctctggaacaccttctgctaacatccagaatctcataccacagactggtcaagtccaggttcagggagttgcaattggtggttcatcttttcctggtcaaacccaagtagttgctaatgtgcctcttggtctgccaggaaatattacgtttgtaccaatcaatagtgtcgatctagattctttgggactctcgggcagttctcagacaatgactgcaggcattaatgccgacggacatttgataaacacaggacaagctatggatagttcagacaattcagaaaggactggtgagcgggtttctcctgatattaatgaaactaatactgatacagatttatttgtgccaacatcctcttcatcacagttgcctgttacgatagatagtacaggtatattacaacaaaacacaaatagcttgactacatctagtgggcaggttcattcttcagatcttcagggaaattatatccagtcgcctgtttctgaagagacacaggcacagaatattcaggtttctacagcacagcctgttgtacagcatctacaacttcaagagtctcagcagccaaccagtcaagcccaaattgtgcaaggtattacaccacagacaatccatggtgtgcaagccagtggtcaaaatatatcacaacaggctttgcaaaatcttcagttgcagctgaatcctggaacctttttaattcaggcacagacagtgaccccttctggacaggtaacttggcaaacgtttcaagtacaaggggtccagaacttgcagaatttgcaaatacagaatactgctgcccaacaaataactttgacgcctgttcaaaccctcacacttggtcaagttgcggcaggtggagccttcacttcaactccagttagtctaagcactggtcagttgccaaatctacaaacagttacagtgaactctatagattctgctggtatacagctacatccaggagagaatgctgacagtcctgcagatattaggatcaaggaagaagaacctgatcctgaagagtggcagctcagtggtgattctaccttgaataccaatgacctaacacacttaagagtacaggtggtagatgaagaaggggaccaacaacatcaagaaggaaaaagacttcggagggtagcttgcacctgtcccaactgtaaagaaggtggtggaagaggtaccaatcttgggaaaaagaagcaacacatttgtcatataccaggatgtggtaaagtctatgggaagacctcacatctgagagctcatctgcgttggcattctggagaacgcccttttgtttgtaactggatgtactgtggtaaaagatttactcgaagtgatgaattacagaggcacagaagaacacatacaggtgagaagaaatttgtttgtccagaatgttcaaaacgctttatgagaagtgaccaccttgccaaacatattaaaacacaccagaataaaaaaggtattcactctagcagtacagtgctggcatctgtggaagctgcgcgagatgatactttgattactgcaggaggaacaacgcttatccttgcaaatattcaacaaggttctgtttcagggataggaactgttaatacttccgccaccagcaatcaagatatccttaccaacactgaaatacctttacagcttgtcacagtttctggaaatgagacaatggagtaaatattacacaaatacttattcattgtggttatttttatacagtagtgagaagaatattgttcctaagttctccggaattc

SEQ ID NO: 29034 - DNA, 4699 bp, Homo Sapiens
tctagaaatttcatggtggtttctgtgtctactttgcattaataacccctaaaaatactttagaatacaaaattttagacttcctgtgttgtacaggaccaagccttgcctcagctgagtgagatccacagaaacttgaacaatagccctgtcctgagcaggccgcggggcagctttctgtcatctatgtgtgcacagaagtgtgctgtcctcacacatctcatagatagcagaaaccatctctatcacatcaaaaattgagctaaatatgaaaatatctgtacacacacatcacaagagatggaaatagggcataaaaagatgcagagatattgaccattttcactgctggctgtagcatcgctgctcacacacacataaacagaaataaatagcacagtggaaagtggatgatagtctgacctaaaagattgaaactctaatgatatctaaagttcagtgatgacacagtgctgatggcttggacacagttccttcaaaaccattgttcaagtcatagttgtaccttttggaaataagacactaacaacatatcctatccaactcatctctccgggctagagtctcaaagaaaaataagggatacacctgacctgcagtgagcaaagcagaagccagtctctgaggtggtgaggcccacccagtgtggagctcaaaggtgccattgttcttctcctctttataaagggagttgccacgttcctcccagcacagagttgggagtgactccagagcctcctgcaagatgctgttgattctgctgtcagtggccttgctggccctgagctcagctcagaacttaaatgaaggtaaaacagaagagggaaaagatgtggtgactctgcttggggcttaggaggtgataatggtaattacggggaggagaggagaatgaaaacacagatggggctgcagagttttcatgcctaggatcaggagacctgttgtaccctcattccacactaagggtttctaatttatttaatgtacaatgaaatccaataaagaatttgttccaggggaatgagaaggtaagatttgcatttatagatagaactgtgctgtgaaggatgcagtagagaatgcaaggcagattcatggaagtccagctgtgaagatcctaaactgatctcagtaagtacacagggatgatggtggccttgctgtacagtgcatcagcatcgatgatggcgataaacacacacagtatcagagatactgcagagacagagaattggatggaacacttgtctctgtttaactagagatacagaaatatcagagccaatcattgtcatttttctctcccttacacgcagtatttcaatgtgctgggagtggtatgggtaagattgtattgaagtgattacttctggttaccccaattgagaaagcatgtgtacataagcaatgtatttataggaaatggagggcataagaacaccaaagtatcacattgaagtacctggcatgtgtgaatcaaattagcattaagtcttgagggatgctagggagggaaaaaaggggctcttctatgttgagttcatggctgttgctctgtcataacaaccctgtctccccttacaccttcctccccttccagcagcttcacagatggtggctgactagttaacttaggggatgcatggggtcatgagaagacccttttccctgtagaacacttgtgagtcttgaaaggttcaagatgtaacttttcccatcatcctgtgcttctcttctagatgtcagccaggaagaatctccctccctaatagcaggtaaagcctgattcgttctcaatctgttttgactgtctttttctgcttatgagtggatcagttctccagtgtcttcttatcaaaactttccttccaggagattgattaatgttagtgcccccaacaatattggcactcttcgtgcaaccttgattctgggcatcatgagcaggccaccaaattgaacggcagagatgcttggcttagatgacaacaggagtgtgttgcctcacccccggcaggaatgctgcgggagatgacagacaaatgggcagcatcctcattctgtctcctctttatactgagaggccctcaactgctttgttcttccccagctttccactccagagttctatgtcttcactgaaaatgcaaagaaattaatgtctttgttccatttttgtgtatttccccactcagcttgttacccaagctgataaaaatttactgcaactattcagtgaatcttgtgtgggcttttactctgtctttctcttctctctttgtcctccaggaaatccacaaggaccatccccacaaggaggcaacaagccccaaggtcccccacctcctccaggaaagccacaaggaccacccccacaaggaggcaacaaacctcaaggtcccccacctccaggaaagccacaaggaccacccccacaaggagacaagtcccgaagtccccgatctcctccaggaaaaccacaaggaccacccccacaaggaggtaaccagccccaaggtcccccacctcctccaggaaagccacaaggaccacccccacaaggaggcaacaaacctcaaggtcccccacctccaggaaagccacaaggaccacccccacaaggagacaagtcccaaagtccccgatctcctccaggaaagccacaaggaccacccccacaaggaggtaaccagccccaaggtcccccacctcctccaggaaagccacaaggaccaccccaacaaggaggcaacagacctcaaggtcccccacctccaggaaagccacaaggaccacccccacaaggagacaagtcccgaagtccccaatctcctccaggaaagccacaaggaccacccccacaaggaggcaaccagcctcaaggtcccccacctcctccaggaaagccacaaggaccacccccacaaggaggcaacaaacctcaaggtcccccacctccaggaaagccacaaggaccacccgcacaaggaggcagcaagtcccaaagtgcccgagctcctccaggaaagccacaaggaccaccccaacaagaaggcaacaatcctcaaggtcccccacctccagcaggaggcaatccccagcagcctcaggcacctcctgctggacagccccagggaccaccacgccctcctcaagggggcagaccttccagacctccccagtgacagcctccccagtcatctaggattcaatgacaggtatgattccagtttattcttcaccaagtgctctaattgctacagctctccagctttattgtgccaatgaatcagctaaagcccattggcattgtaagtcccagatcccatttctaaagatttgtattgacatattctggaaatgggtaacaagatcctatatttgtaacaaactctttaagaattctgatgaaacaaaattccaaataatctgtcttaagttgtgttggcaacaaggaagtagtaccatgttctctctggcgctctgttttctgtgcacaaactgagagacctcccatttaaagttttcacctgagcactgtttgctcagtcctgcctcacaccagcctcttgagtccagtattcctgccaagtggtccctgaactttcagcagctaaatggtgtctcatttttcaaattcttactgttcaataagtacatgattaagctaacaaaaaatatctaatgcaatggaaaaatatgaatctaaatttaaaggcatgactcatcctacctgcctcccctccttcagaaaactgccactgttaactttatggcatcttctgtttgaaatatttatgtgtacatagacaactagaatatttttcccccagaactaataccataatttatattcaggtacatatgttagtcatttaaaaaatacatttctttgaaaatttccacatacgtctatgaagctaagtagatctcttcagtggttatctgtttgtttttaccattttatactactccattatgtggctgcaccgtgatttctttaaccaatctgtgtcactggacactgagggtggtttcagcttctcactgttataaaatatgttccagttcccatctgtgtaaatatatctgtgaacaaattcagcagcaagtaataacaagctaagaatgatcttctgttctcatcacgtaaggaacaatttggagcacattttgtgcaagggcatccaaagagtgaacacacaaaaaattagggaggaaacacaggaggtagaagggatgggggagagaggatgggctctcatgtactgtagtgcagtaagaccagtgaggaattcgacatttcctgccatgacaagtctggtctatgaacttccttctttgtttgtttcaggaagtgaataagaagatgagagtgattcaaatgattcaaattccatgacattggaaaaaggtcatcatagctctaacttcaatataccaataaaataatcagcttgcaatttctgattgtggtgtctgtttctcgatatttgtgaatgtgggatctgaggaccaagaagacttgtataagaacatctaggaaccctcttccttgatgctccagggagctctctcctcctttaatcctaatttagctagctgccatgaaaaatattttactgtttctctacttccctgacttctattttttccccgccaagatggagccttt

SEQ ID NO: 29035 - DNA, 4092 bp, Homo Sapiens
agccagcccttgccgtggccggagccgagcggcgcatccgggccggagaagaggacgacgacgaggtcctcgaagtggacccgtttgcgaagcgccagggagaaggaggagcggacgcatcgtagaaaggggtggtggcgcccgaccccgcgccccggcccgaagctctgagggcttcccggcccccactgcctgcggcatggcccggggctcggcgctcccgcggcggccgctgctgtgcatcccggccgtctgggcggccgccgcgcttctgctctcagtgtcccggacttcaggtgaagtggaggttctggatccgaacgaccctttaggaccccttgatgggcaggacggcccgattccaactctgaaaggttactttctgaattttctggagccagtaaacaatatcaccattgtccaaggccagacggcaattctgcactgcaaggtggcaggaaacccaccccctaacgtgcggtggctaaagaatgatgccccggtggtgcaggagccgcggcggatcatcatccggaagacagaatatggttcacgactgcgaatccaggacctggacacgacagacactggctactaccagtgcgtggccaccaacgggatgaagaccattaccgccactggcgtcctgtttgtgcggctgggtccaacgcacagcccaaatcataactttcaggatgattaccacgaggatgggttctgccagccttaccggggaattgcctgtgcacgcttcattggcaaccggaccatttatgtggactcgcttcagatgcagggggagattgaaaaccgaatcacagcggccttcaccatgatcggcacgtctacgcacctgtcggaccagtgctcacagttcgccatcccatccttctgccacttcgtgtttcctctgtgcgacgcgcgctcccgggcacccaagccgcgtgagctgtgccgcgacgagtgcgaggtgctggagagcgacctgtgccgccaggagtacaccatcgcccgctccaacccgctcatcctcatgcggcttcagctgcccaagtgtgaggcgctgcccatgcctgagagccccgacgctgccaactgcatgcgcattggcatcccagccgagaggctgggccgctaccatcagtgctataacggctcaggcatggattacagaggaacggcaagcaccaccaagtcaggccaccagtgccagccgtgggccctgcagcacccccacagccaccacctgtccagcacagacttccctgagcttggaggggggcacgcctactgccggaaccccggaggccagatggagggcccctggtgctttacgcagaataaaaacgtacgcatggaactgtgtgacgtaccctcgtgtagtccccgagacagcagcaagatggggattctgtacatcttggtccccagcatcgcaattccactggtcatcgcttgccttttcttcttggtttgcatgtgccggaataagcagaaggcatctgcgtccacaccgcagcggcgacagctgatggcctcgcccagccaagacatggaaatgcccctcattaaccagcacaaacaggccaaactcaaagagatcagcctgtctgcggtgaggttcatggaggagctgggagaggaccggtttgggaaagtctacaaaggtcacctgttcggccctgccccgggggagcagacccaggctgtggccatcaaaacgctgaaggacaaagcggaggggcccctgcgggaggagttccggcatgaggctatgctgcgagcacggctgcaacaccccaacgtcgtctgcctgctgggcgtggtgaccaaggaccagcccctgagcatgatcttcagctactgttcgcacggcgacctccacgaattcctggtcatgcgctcgccgcactcggacgtgggcagcaccgatgatgaccgcacggtgaagtccgccctggagccccccgacttcgtgcaccttgtggcacagatcgcggcggggatggagtacctatccagccaccacgtggttcacaaggacctggccacccgcaatgtgctagtgtacgacaagctgaacgtgaagatctcagacttgggcctcttccgagaggtgtatgccgccgattactacaagctgctggggaactcgctgctgcctatccgctggatggccccagaggccatcatgtacggcaagttctccatcgactcagacatctggtcctacggtgtggtcctgtgggaggtcttcagctacggcctgcagccctactgcgggtactccaaccaggatgtggtggagatgatccggaaccggcaggtgctgccttgccccgatgactgtcccgcctgggtgtatgccctcatgatcgagtgctggaacgagttccccagccggcggccccgcttcaaggacatccacagccggctccgagcctggggcaacctttccaactacaacagctcggcgcagacctcgggggccagcaacaccacgcagaccagctccctgagcaccagcccagtgagcaatgtgagcaacgcccgctacgtggggcccaagcagaaggccccgcccttcccacagccccagttcatccccatgaagggccagatcagacccatggtgcccccgccgcagctctacgtccccgtcaacggctaccagccggtgccggcctatggggcctacctgcccaacttctacccggtgcagatcccaatgcagatggccccgcagcaggtgcctcctcagatggtccccaagcccagctcacaccacagtggcagtggctccaccagcacaggctacgtcaccacggccccctccaacacatccatggcagacagggcagccctgctctcagagggcgctgatgacacacagaacgccccagaagatggggcccagagcaccgtgcaggaagcagaggaggaggaggaaggctctgtcccagagactgagctgctgggggactgtgacactctgcaggtggacgaggcccaagtccagctggaagcttgagtggcaccagggcccggggttcggggatagaagccccgccgagaccccacagggacctcagtcacctttgagaagacaccatactcagcaatcacaagagcccgccggccagtgggcttgtttgcagactgggtgaggtggagccctgctcctctctgtcctctgacacagagagctgccctgcctaggagcacccaagccaggcagggggtctggcagcacggcgtcctggggagcaggacacatggtcatccccagggctgtatacattgattctggtggtagactggtagtgagcagcaaatgcctttcaagaaaataggtggcagcttcactccatgtcatatatggagtgaatatttcaaaacgttgggaataagggcctgcaaaaggcagcgaggaggcacctcgggtcttgaggttcctgacaaccgatctggtctgttggtttgaggatgaaggggctccatttctgctgcctccctgctgagaatattctccctttagcagccaaagattcgctggaacggaggctgccctctgctgcctgttggggtcggaagacaaggggcttctgaaatgggagttcctgagatacaacaaaatgtgtgccttcaaagaaactgacagctttgtatttggtgaaatggttttaattatactccatgtgtattttgcccactttttttgggaattcaagggaaagtgtttcttgggtttggaatgttcagaggaagcagtattgtacagaacacggtattgttatttttgttaagaatcatgtacagagcttaaatgtaatttatatgtttttaatatgccattttcattgaagtattttggtcttaagatgactttagtaatttaactgtttatgttacccacgttgggatccagttggtcttggtttgcttctctctgtaccacgtgcacatgaggtccattcattttacagcccctgttacacacagacccacaggcagccgtctgtgcccgcacacattgttggtcctatttgtaaatcccacacccggtgtatccaataaagtgaaaccaacccc

SEQ ID NO: 29036 - DNA, 473 bp, Homo Sapiens
aggaggaccaagccctgagcacagacacagtgctgcctgcccctttgtgccatgggctccaggctgctctgttgggtgctgctttgtctcctgggagcaggcccagtaaaggctggagtcactcaaactccaagatatctgatcaaaacgagaggacagcaagtgacactgagctgctcccctatctctgggcataggagtgtatcctggtaccaacagaccccaggacagggccttcagttcctctttgaatacttcagtgagacacagagaaacaaaggaaacttccctggtcgattctcagggcgccagttctctaactctcgctctgagatgaatgtgagcaccttggagctgggggactcggccctttatctttgcgccagcagcaaagaacccaggggcaatcagccccagcattttggtgatgggactcgactctccatcctagaggacctgaacaaggtgttccc

SEQ ID NO: 29037 - DNA, 1687 bp, Homo Sapiens
cccagccccgaggctcagaagcggcaggcggaggcgcggtccgggcgctatggccatgcccggcgggtctcacgcggctgcccctcgcccggcgcgccttcggtagggggcgcccggggcccagctggcccggccatgctgctggagacacaggacgcgctgtacgtggcgctggagctggtcatcgccgcgctttcggtggcgggcaacgtgctggtgtgcgccgcggtgggcacggcgaacactctgcagacgcccaccaactacttcctggtgtccctggctgcggccgacgtggccgtggggctcttcgccatcccctttgccatcaccatcagcctgggcttctgcactgacttctacggctgcctcttcctcgcctgcttcgtgctggtgctcacgcagagctccatcttcagccttctggccgtggcagtcgacagatacctggccatctgtgtcccgctcaggtataaaagtttggtcacggggacccgagcaagaggggtcattgctgtcctctgggtccttgcctttggcatcggattgactccattcctggggtggaacagtaaagacagtgccaccaacaactgcacagaaccctgggatggaaccacgaatgaaagctgctgccttgtgaagtgtctctttgagaatgtggtccccatgagctacatggtatatttcaatttctttgggtgtgttctgcccccactgcttataatgctggtgatctacattaagatcttcctggtggcctgcaggcagcttcagcgcactgagctgatggaccactcgaggaccaccctccagcgggagatccatgcagccaagtcactggccatgattgtggggatttttgccctgtgctggttacctgtgcatgctgttaactgtgtcactcttttccagccagctcagggtaaaaataagcccaagtgggcaatgaatatggccattcttctgtcacatgccaattcagttgtcaatcccattgtctatgcttaccggaaccgagacttccgctacacttttcacaaaattatctccaggtatcttctctgccaagcagatgtcaagagtgggaatggtcaggctggggtacagcctgctctcggtgtgggcctatgatctaggctctcgcctcttccaggagaagatacaaatccacaagaaacaaagaggacacggctggttttcattgtgaaagatagctacacctcacaaggaaatggactgcctctcttgagcacttccctggagctaccacgtatctagctaatatgtatgtgtcagtagtagcaccaaggattgacaaatatatttatgatctattcagctgcttttactgtgtggattatgccaacagcttgaatggattctaacagactcttttgtttttaaaagtctgccttgtttatggtggaaaattactgaaactattttactgtgaaacagtgtgaactattataatgcaaatactttttaacttagaggcaatggaaaaataaaagttgactgtactaaaaatgtatacttgttgccaggaaggtgacctcaaaaattaaaagtataattattcggccgggcatggtggctcacacctgtaattccagcactttgggaggccaaggcaggcggatcacgaggtcaggagttcaaaaccagcctgtccaatatagtg

SEQ ID NO: 29038 - DNA, 2880 bp, Homo Sapiens
caaatatagagactctccaagggcccactgagccccaaaggatttggatcaaatatggtgatattatggaaatatgtagtaatatcttaaaaatgtgtaagatatagtctctttttttttttttttaagagaaggggtctcactatgtttttaggctggtatcgaactcctggtctccagtgatcctcccacctcagcctgtcaaatagctagaaatataggcatgtaccaccatgctggcttaagatgcattctttgacacagcaattctatttctataagtttatccatataggtaagagaacatatatacaagataatcactgtaactttacttattactgcaaaagtttaaaaataaccaaattgtaataattttataatattttatcagtacaaaaaataagtgatggcatatacaaaccctgggatagtataaggctattaaaattataatagcattccatgtattttgatatacaaagtgccaatgttacaggtgaaaaaagcgaagtgcagaatactatgtgtaactgttaatagtgatggtttgctgggtcagaactgaaggcctgggggtagaaatgagagctcatgacttctaccttttgaatgttgttccttgtgcatgatttacaattttctaaaactaaaaaaaaaatctcagaaaggggctgtacgcacctaaattactttgatattccccaaagtggagagaagtacccgctacacattttatgtgatgcattcagatcacaccaactccttgaactaaatccgaatttttattttaatctgataaacttggcctactattttactgaactcatttcccctatagcctgataaggtcattgacctctccatactggcaccagcgggagactactcacctcgagatctcaaaagcctcctacatgaggttagtaatatccctgaatcctgcaatgaattaactctctactccactgggtcccaggtctgcccccagagagtcatccagagagtaccagggaccatcttcagaaaacaagaggcatttgatccccaaacttcttgaatgaaagcgctgttgtttttcttttttgaatatataaaagtaaatactcaagcagatgggaaacagaacaggatagtaatacccttatcatcattaacaccttggatcaagaagaggcattaagcatacagactcacgctttgatgaaagctgggagaaagaggagcatcaaagggatcttgagaacaaaggcagtccttcccctcccaatcacatgcccacctcctctcactgcagcttctgtctcaggtcttctcccagcagagctataaatccaggctgactcctcactccccacatatccactcctgctctccctcctgcaggtgaccccagccatgaggaccatcgccatccttgctgccattctcctggtggccctgcaggcccaggctgagtcactccaggaaagagctgatgaggctacaacccagaagcagtctggggaagacaaccaggaccttgctatctcctttgcaggaaatggactctctgctcttagaacctcaggtaggagacatcaatcttgcacatctgcaaaatctagaaaaaaaggattggagaaaggatctggagtcaagtgtggaaaggtctacctcacttgagtgactttacttaatcttcctggaccttgattttctcatctataaattaatcagtgagaaccaaataaatctaaaagattttcttttttctaagactttcagctccaagatatttctgtgaaatttgctacttttaagatagaaagagctacactgactagttctttgtagatctaaatgggcagacttagttatatagagagtgttttactttgtccattggaaaagcttttagaacctagagaggaacctataggtgtgttttgatgtaggctaataggcttgattaaatctttctacaatacatccttagatcaaaacatcatattgtgtctcatacatatacacaattattgtttgtcaattaaaacaagtaaatatgtaaaatgttaaaaaaaaaaaaaaaaaaaaaaggagagacagagaatgaagaatttgaatttggaaagtcttcaaagactccttgagcaccaaagtatttggtccatgacattagcatgcacaatgcggcatttcagaaactgattcaggtgctttagggagccttgttaggacctggaaatcacacatggaggtcaagattaggcgtgtggatgaagcagaatgaagagtaggtaaccctgaggttgagaggtatattgttggaccagggagcaggtaataaatacatcctggatagactcacatggggaaaaaaactatgatcttgcatgactaacacatagctagtaagatttcttgtcacttacgacaaagacatgaattttctccatcctaacatgactgatacagtgtctcttatttagactatctcagttagtctggctgtgcttgtcctttttcccacctccctcgctgtgcctgaccctctcttctttccacaggttctcaggcaagagccacctgctattgccgaaccggccgttgtgctacccgtgagtccctctccggggtgtgtgaaatcagtggccgcctctacagactctgctgtcgctgagcttcctagatagaaaccaaagcagtgcaagattcagttcaaggtcctgaaaaaagaaaaacattttactctgtgtaccttgtgtctttctaaatttctctctccaaaataaagttcaagcattaaacttagtgtgtttgacctttttaattttcttttctttttccttttttttcttttgctttgttatatggtggtttgtatggttcctttgtatt

SEQ ID NO: 29039 - DNA, 909203 bp, Homo Sapiens
attcacacagttaaagtaaatttggatatggagtatgatgaggaggtgatgatttctaaattttcctgttcaagttttctacatgtctacaaacacattaaaatgtctctcttagcttcataattaaccaaaacaaagaataagcaaatacaggttttttttaaaaaaggtttaaatgtaaacacattatatgacactaagtccaaattctgatataaaatatctggaacaactatttagaaaactacaaactttaaaaaataaacctcacttcataaaataaaaagtgtgtatacactattaactagtgtattaggcctaccaagaccatgactattagtaaatcacatctaagccctatcaaaactctaagagcattgtgtgctgttagaggtaaagcattgtgtgaaatgtttgctgagaattgccatcttttaagaaggccaccaaccttatctcctgggaattttccattcaatgccattccctgaacagcccctacacatgtttgaaaccatcaactgtaacagtgtctgtgatgctgaccagatggcacacgtgggtcattcaactttttccagaatatactctgggggtacaaacaccttaaaaagttacattcacagcagtttgtaccacatagaaaccaagactccttttgggagtgagaaactacaataataaagtacaacatatcaggatcacagaaggtaggattcggatgatggatgtgtgaacagagatgatggatggtgaactacagagacaggctgggctctcaggtctctgggccacggaaggagtgtgtcctgtaaccagcacaggacacagctcagtaagaaccatatactccaaggagctcggggcttggagctgggccctgtgctcactgatggggactcagcagctgtgtcctttctggcctggcagagtcccctgagcagggacctgtgtatggtctcagcaggtgcttcctcccagggccctcccaaggcgggaagtaaaccttcctcctcctcaggctgcagtgtgagctgagctccagctccagggctcagggaggggctgggcagtcccctgatggaaacacacttgcatgagcagcccctcctctgcagagggtggggaagaaaaggatgcctggggcagtccagccccacggtgtggtggggtcaggggctgtgtccaccatggacttgactcctcccctccttgtgatcctgtctcactgtacgtgtcgggacgggcctcaaagaccagcctacatcagaaactttgactgaggcccctgagaaatgttaccctgaactctgccttagtatctggatgtgtcttttcacctgatagagttataaagattttcccagttaaaaacaaaagcaaagctctgccagactcgtgttcgtggctccaaatctgcttcagccactgagcaggagctgagagggaagagagagagaagaacacaagatccatatggggaaggatttctatgagggtgtggcagtgagagcgggtggcaagttgccaaagaggcctaagccacagaagtgggtttcatgtgggactttcggaatgagcaggagggcgatgggtggagggtgagggtcagaagattctaatcagaggtgagaacccaaagatgagttattggtcattcaagtcaaacagtgaaattaccttggcctgtgcctccagtcagtggagcagggaaggggccaggatgtgcttcctgcaggtgttactggaaaggggtcctgattcagatcccaagagagggttcttggatctcatgcaagaaataatttgggaggagtctataaagtggaaacaagtttattaagacagtaaatgaataaaggaatggctactccatagacagggcagcaccaaacactgctggtcggctatttgtatagatagtccttgatcatatgctaaataaggagtggattatttattagcttttcaggaattctttttaaaaatatagaccacataaggtaacttgtggatgttgccatagcatttctaactgtgaggacaaccagaggtcactttcctcaccgtcttggtttcagtaggttttggccggcttctttagcgtatcctgtcttatcagcagggtctttatgacctgtatcttgtgatcccagtctggttgacttcctagctcatcctgtgactaagaatgcctaacctcctggaaatgcaggccagcatgcctaagcctcatttaatcaagcccctattcaacatggagtcactctggttctaacacctctgacttagggtggctgcagagctggaggtgcagattggggcagatcagcctcctgagaaaagcacacagagccactgcggggctgtgaggtgggagagatgaactcacattggcatttgatcagtgactctccagctgtaatgagaatagaatggagaggcctgggacaggaagacaggatgtggttgctcatgccatcctggtgggaagatctaggtgagttactgtggggtaaagaggagagagcagattccttgtcactttatgctgtagaatacattggacatggagagggcttggagcttgtgtgtgagaaaagcagatctatctcggctgactcccaacaaactggctgagaatttagatggaggattattattaaataaaagaggaagactgaaatgaatattgtcatcgtatttttttacccagggttgggataggtggaaatgtgtgtgtgtgtgtgtgtgtgtgtgtgtgtgtttaaatattcactaatttttcaattcaaaaatatttactgcgtgactactaagtaataatattatacaggttttagcgttaccatggagaatcaaattgtcaaggtcacaggcatctttttgttttgtgtggatcactgtgaaagatactatgctaaattttttctgaatcatgcagatgaaagcattaaacacatacacaaacatttacgtttgtgtgtgtgttgtgtgtgtgtgtgtgtgtatgtgtaatctatctcagcatacaatgccactgaaactacacttgcggattaggtcctcggaaaaataatcgtgttaacattcacgatgcaaatagaatggtacctgacacaaagtaagtgctataaaagaatacttgaggctgggcgcggtggcttatgcctgtaatcccagcactttgggaggccgaggccggtggatcacctgaggtcaggagtttgagaccagcttgggcaacacggtgaaaccccgtctctactaaaaatacaaaaattagtcaggtgtggtgatgggtgcctgtaatgccagctactcgggaggcttaggcaggagaatcgcttgaacctgggaggcggaggttcaacaagagcaaagcccattctcaaaaacaaaaaatttgaatggttaaatcacattggactgtgagtaaagggcttagacaaggtgtctcggaacttttgggtcatcttcttgatctttccataaaactctaacccttctattcttaacctcccccattcccaatttcaccctgatgtgcacatcctacctggtgcctagtcatcccggtggcccctctctgggctgtatctagggagagtggtgaccttggtcatcttcctcaggtccaagtatccataagagaagcagacttttctctctttcataatgatggtctcttcttgaataatttccctgtgcattttcattaagggtctcaccccatcaagggtgtgatgaggacagtgatgagggtcacggagcccggcctcccacggggggatgtggggtatgatgagagagagaagcaggtgccctcaggcccatatggaggctggggagggttgttaaccctcctgccctcctggccactgggtgcaggacatgttctctctgaggctcactcacctatggccccaaccacacaaaaatctaaatggggaagaagcagaggatgacttcatgctgaggaggcccatcttgcagcgagaaatgtgctgtggtgagcacctgcagcacaaagagcctggggtgggggtggaggtgcgtgagcgctgcctctgtgtggggatggtgtgcgcaaggcagtgctgaggaccttcaagccagtcaggaatgaacctgggctctgagacagtggagggaagtgtggcctgtccctgagggtctgtgggggtttcaactgggaaaccaggccctggacccctaccctgggccctctgctctgtgctttctggggcccagcagctgggacctcccaggagcagaagaggctcctctagccccaccccacactcaactttccccaagttcaggcccagggatagcagggggaggggtgtgatttgcatgaagggtgctctgtgccctcttaggaggagaggataagagagactctgtgcagttctgctcagctgtgggcttaggaagcagagcctggggcatctccaccatggcctggacccctctcctcctccagcttctcaccctctgctcaggtgactgcctgtggaatgccaaagtgattattggggacacatgggatgacttttctcttatattttaacattgtggggtgggtagtgaacccagactcacctctctgtgcctgcctcctctgttccagggtcctgggcacagtctgcgctgacccaggaagcctcggtgtcagggaccgtgggacagaaggtcaccctctcctgtactggaaacagcaacaacgttggaagttatgctgtgggctggtaccaacagatttctcacggtgctcccaaaactgtgatgtttggaaattctctgccctcagggatccctgaccgcttctctggctcaaagtctgggaccacagcctccctgactatctcgggcctctagcctgaggacgaggctgattattactgttcaacatgggactacagcctcagtgctcacacagtgctgcaggcacatggggaaccgagacaaaaacctgcccttggcctgtcccgaggctgatcactccatacttgcctatgacaaacaaagagggtgcctgtggctgatcgtacagtttaagcaagggaggaagtgagactcagccacaggcccctgcaaagggtcagcgggccttgttcccacattgtctctatttgaaaaagtgagataaatttcacttcgtataaaatgtacaattaaattgtcttattgtgtttacagaattatgcatctatcaccataatctaattttaaaacgttttcatcaccccacaaaaaaacccccacaattagcagccacccttcaccctttctccccagccactggtcattgctaaagactttctgtaaagaacatgcatttaaagacctaagaaactcagtgatgccaaacagctaggtttttcaaatgcccaagcatgtaataatagattactgaaaccaaagataaagacacaattatgaaagcagacagaaagctttataatatatacagaaaatcaacaattcaaacaatgagaggtattttatgagtatacattgaggccaaatggcagtgttatgttcttacaaagtcaaaagaaagaaagaaagaactgttgagtcataatgctatatccaggtaaagattttttttttttaaaaaaggtaaaaaataagactttgtcagatgaagaaaacctgaaagaattcatctaaaaaaaatcaaaacaaatcaactctaagagaaaattttcaggtggaagataaatgataatggaaacattgaacccaaagaatgcaggaagaataaccaataaatatagtagtaaaagaccaaatttttagctctacagttctggaaaatatgcatatcaaaagctaagttatagcatttttgatataatttctacttatgaaaaatattatatatacatatatacacatatatacatatatatacacacacacacacacacacacacacacacacacacacacacatatatatatatacatgaaacttcaaccaaaagaaggaactgtaaggggtctacatgactgggaaaatattaggcctattattaaatctaaatagatcatgaatagttacatgtacatgttgtaatctttacagcaaccaatgtaaaactgtgcagagataccaatataaaatcaatataaaaatcaaaagagcccactaaataatactcaaataatccagaagtagcagaaacagggtggagaggaacaaaagttataaagagaaaaaggaaacttacactaaaattgtaagcttaaatccaaccatgtgaataatttcattaaatgtaaatgaactaagcacatatattaaacacagagtttgtcacactgagaaaaataaaaaacaagagacaagcatgcgattctataataaactctaaatagaagtatatacacaaaagtaaaatgataacacaaataaacacctagttaaaatggcataaagcattacttcaatgttaattgcatcattctgattttctaaattgcatattgtgttgtaagatgccacttttgaggaaaactggttgaagtgtaactaaacctttattacatattttttcaccttaatgtgtatctataattatgtttacagaaaacattaaatgaaagtaaaaggatggaaaagttttatcatgtaatcctgaattaataacacaaacatatagtgtggatatttctttgcgtttcttttttgttgttgtcgttgttttttgaaaaagtctcattctgttgcccagactggagtgcagtggcacaatctcggttcactgcaacctctgcctcccagattcaagtgattctcctgcctcagcctcctgagtagccgggatacaggcgcccgccaccacacccagctaatttttgtatttttagtagagatggggttttgccatgtgggcgaggttggtctcgaacttctgacctcaggtgatgtgttcacctcggcctcccaaagagctggaattacaggcataagccacaacgcctggcctttttttgttttgttttgtttttgagacagtgtctcactctgttgcccaggctggagtgcagtggtgcaatcatggctcactgcagcctcaaactcccaggctcaagcaatcctcccacctcagcttcacaagtagctaagcctacgggcacgcaccaccatgcctggctaattttgcttattttttgtagagacaagatctcactatgttgcccaggctggtctgtaactactgggctcaactgatcctcctgctttggcctcccaaattgctggaattacaggcataagccaccacacctggcccagtatggataattcatgggtaaaaaatgtaatacttgaaaaacaaattagatgttttcttattatttccacatagcagagtactaactgtaggacattgggatgtacttttgaataagaaatgaaggtttaaaaaaagataaaataaaacaaaataagtgcctaaaactgactggtgaggggtttacccaatgcatgagcagtagaaagaatttaattttttgcatccaggatactaaaaagtggaaagatagatttcttttttttcctgttttacttcttttgggttgctctatttgatctaattaaaaagcctattactcctatgctatgctgatggaagagaagtcttctctaacttagtcccagtgagattgcctcctctgggccaacaatgctcatctagaacttggaatttcgataaatccattctgaggtgatgagcagcagcagcaccagaaaagttgatccaggccatctaggaccctccagggaagggctcaggcctgtcaaagaggcctgatagaaactggggcctgcagtcagtcagggacattgaagctctcctgacacggtcccaccagctgggaaaacactcggggtctccctcgggtttgatcagatggcaagttccccattccctgattggcccaaagctttgacctgttggacccggggcctatcaaaggccaggtgtcctctccccattggaaacctccctaggctcaactcttctcttctcattctcctgctggcctgggagcatccaggccaaggggtgaggtggggacagccctacattaagtttttatttcaaggtagaaaatctgtccccttgattgtttgggaaactataaaaagactagggcagctcagggtctaaaatacagcttcagggagtacagagttagagtgcagaaacttcaattccatttactctctagcaatttacctaatatcaaaacatacagttatgttatgtttacaaatatgcacgcacctctattaatatgtgttcataagtacatacacatgcaccattacgtttacacatacatgcatgtaacaccaactgatgtaaaaatcattgttttatgtactcagttttcctttgagtttaccctcttttctctactttttaaaatatttatttctaatttggggagctactaactgagattatttttcatctcactgaaaaacagttttagaatttcctgtagagcagttctgctggtggcaaattccatcgggttttgtctgaaaagtagccattttctcctattttttctgtttattatatagaaagataacttatataaagtaaaattcacaggtcttaattatacagtttgatggtttttacaaatgcagatgctcatgtagccaacagtccgatccattctcacaacatctccattactgcagaatggagacattctgttccagtcaatgtaaattatcccattacacctaccaaatagaacgtgtatgagagacacctttctcctgaggacttttgcaaagtggggtggatcatgtgtcccgctcccactgaaaagggctaaatggaaaactaaagtctgaaataaaataggaggctgccctgacgaggggtcccactttgcccttggacagagaacaggccgtggtcaaggccctggtccgggcagaagcctctgtcaggacccactggcatctggtcacagacacgatggacctgggcctaggcagaagggggtgctgttggtctgctgctgagggctctgtgggtttctcagctgggaaaccaaacacttgaacttggtctccacgcagggttcactggggccagcagctgggctctctctgcacccttggagagcctcaggccaggcccagcccaggtaacccctcccagaaatgtcaccccaccactgggactgacactcaggcacacggagtgatttggttgggcagaggaagaggagcacatttgcatgaagggcccctctctctcctctgggactacagggtgggtaagaaatacctgcaactgtcagcctcagcagagctctggggagtctgcaccatggcttggaccccactcctcttcctcaccctcctcctccactgcacaggtcaggatggccctcagcaccctgacctccagctcactgataccacctcccaaacttatgccaggaatgtccttccctcttttcttgactccagccggtaatgggtgtctgtgttttcagggtctctctcccagcttgtgctgactcaatcgccctctgcctctgcctccctgggagcctcggtcaagctcacctgcactctgagcagtgggcacagcagctacgccatcgcatggcatcagcagcagccagagaagggccctcggtacttgatgaagcttaacagtgatggcagccacagcaagggggacgggatccctgatcgcttctcaggctccagctctggggctgagcgctacctcaccatctccagcctccagtctgaggatgaggctgactattactgtcagacctggggcactggcattcacacagtgacacaggcagatgaggaagtgggacagaaacctcagcctgctcagggtcttgttatatgacaagttttaaattttcaaatatgttttatatgtacacactccacttggaagcaccgtctggtttaaaatgtttctactctcaatttctcattcaagttttctgaagtctcaggaaaactaaaaacagaaacaaaaatatcatgatgactatgaaatattacctaattttccaaatatgctgaattcagtgcctgtggagctaaccattttctcttgacagaagaaaaatgagccttagaaattgtttccaaatcctgaaagagtcatcattccatgtactcaggacagatttagagagtgctgaccctgccctttgaaagatgttatttgcctcttagtgcccaaataaggaaggataattaggaatcagaagcctacctagggctcccctctctcctctcaaaattgcacttggtgtcatattgccctagaatttatgcctggtgctggcaaatatttttaaatttattttttaatcttttccttttctgcaatcaaatttcttgaggggctgagaagaagaaataggcccagagagaagcaaggcagtctgggtgcaggctctagacagcccagggagaagaaagagggagcagctccctgtgtcctggagggagccctgtccccattgggcttcctgctctgatgtcccctagtggaggctcctcagggagtccagcctcccagaactgccctataaacctcacagtgagctaagcaagtatatccaggaaggagggtctgtggagatgtgagactaaggtgtgttatggcctaaacactgcccatctccatccttcttggggatgacaaagtgaacagtggaggagacaggatacatgggtgcatctggacctcaagcagtaggctgttctgtggtctgtccctaaatcttgtgctggagaccccatacgagagccactccctgaccctgggctggagccctctaccccctgctcacaagaccagcagctgtttccttataggcccccagggagccacagaacagcatcaaccaagaccatcctcttcatgtgtcagcttttcagggagggatcgaagtcatggcccaggaaagggcttggacagcccaggggaggaggctggttggtatgaaggatgccctcctcaccctgagctgctggagggagtacaagggacttggagagcccaggctcagttgatgatcctcaggatgtagagctatgtatgggtctccactgtggtctctcccccgccttctccttcactgcacaggtggctagggctcagtgtcagggctggtgatcaaaagaccaaggtttatgcatgtgtctctgtccactgacccacctctcaccctgtgtctgtcttaatgtccagcgtcctgagcccagcctgtgctgacccagccacctgcagtgcatgcatctgtggggcaggtgggtaccagctcctgcactagaagcagcagcaatgttgggcacgggcatgtgctctggtacaaacatgcctccgagagacccagagctccacatatataaaagcagtcattgacccttaggggcataggcccaatgctgaggctccaggttggagaacatggcctctctgagcatctctggactccaggcagaggaaaaggctgatttttattctcagcttgggacacaagcaccaaggctcaggcagtacttcaggccagtggggaagtgggagaaaaagctgctgcccatccagcaatggagcttctctgtgcagcccccacttcttgggcaagtcagctgattaacgttgcttttcatttgtttagtaaaaatttagattttaaaactcactccagtgaacgcagtgtggagaatgtgtttctgtcctctcaattctaccctcacacccaacccttggcagtaacaaattgtcgtattgtctcatattaagagaaatccctcaataccaagatcaggctgtcctggaaaccaaatccataatgggtcaaaacaggaccagggtcattgtgtctgactcaggatagtcgactcccaaaggtctgtttatccacctcattcactgagaagctactatgcaccagcctcagatccagggattcaaggtacatgatgaacaagagaggaaggggccctgtcctcatggagctgacactgagtggtggaacagataaggcaatcaagtaaaaatgtcaatgcgacaatatgatgtcatcacacagtgaggagagctcagttgggggtagaggagccatcagaaggttgggcaaggaagacacaggatctgactcaagtttatgaagaaaagtccagatgcctcaaagaagatgaacaaggagacagcaagcatgaaggccacggggccagttggggtcattggagagaaaggtcaggtctagcctgtgtttgtaagaggagggactgaagcctgggtgaggagagagggctcaggaatagccttggaaagtggagggagtggatgcgaaacccctgctgagggggcctccatgagcaatgaggctgggggaggccctgagctaatcaccatgatggaaactcagacaacagcctcccagcctctttcaaagttgtcacaggacgcttttctctccaaatggcaaggggggaatcccactatgagttttatttgagatgtctcttctccatgtcctgtcctgtccctaggctaaattcccatgcgcaaacaagatactgctcagtctcaggtatcacattcacacacaaatgctccagaatgagggaatgcactctgaccaacccaccaggaatttttgcctttgagaatactagatcagatcactcacaccatctcccctgacaccatcatgttgaccagtgggttgtctgatcggtttggacagcagaatgcagatgcctgtagttgcagctggggtcagtcacatgctcatctcatggctgggagactttgggtccagacaacaggaaaaaaaggaggtttgcctacgtgatcccacaatgtgcatcactctgtcatccactcccatccttagttcatgttgggttttgtcctgtagatgctgggacctggacaggatcacaagccaggcgatttctggctcacaaagttacagctcaagctccctgatgttgctgacattcttcccacagaccaattttagacagacacactattgccatgcaggcactgacctgagatacaggtagtctcaggagagggaggaagcagatacacatccccatgatggcctccttgtcccagagtgggtaagaaaggcaaggaggccaggaagccacaggagtggccactgcccaccacctgtgcacctgtccctccctcaggtgagaagcagcctgagggtccagcacctgcaccttttcccagtgcccacacacttccaagtggggcctccttctgctcacctcccaaagctactgctttccgggacatctgtgtcattgctgagagtctacttttcatggggcccttgtcccagtggtctgggatcagtgtcagcctgtttaattcagcactgtctctgtcctttcaggacaccaatctagctattaaagctctaattgaattctcctttttttgccctgaaactttagactctccttctcagtgtctctctagaatattttgtctctatccaataagatcaagttatgtcttcaggcctacagccacttctttccccaaattctgcaccttcttttaagttcttattccctcttatggcttattttccactaactagctaatgatgccaaaacatttatctattttacctccttcaggaataaaaaagaaaagcatttatcaatagcccattgtcacaaagaaaggaacagaggagagatatcttctagaaaaatacaggtgaacaaggaaaaagttttaattcctcataggaactactccatgatccaagaaaataaattccagagattcaagagttcactccttagaaacaacagtgtaaatacaaggtagtaaattttcttggttttctcaatgaataacctcaaaagggttagagtatgattataataaaaagattatacattactttcaaaaatgtaagatgaacatgtcaaaaattttaatcgactcatatttctgaaaagaccagtaaaatggtgaataattttaaagaacattttaaaacacacagagtttctattccacgagggcaggacctgtgaggataatttcctgtgttagagaaacactgtcctaaacaacaatagtagaactctctaagctctgaatttatcttctcctgtaagaaaaaatctacaaagtgacaggatccaatttatataaaatatctagcaaagattttggacattcccatctcacacctcctctccaggctctcctcaagtgaaatctactctccttctgcccgtgttctcacctttctgcacgcttccgcctgctgacacatggcttctcctgctttcctttccagtagccctaacagatcaggccctgccagtaagtaagctcctggcctgagggaaccacatcgcatgttactggatttctgaggcacttgccctgccagggtctctctttctgaatcacaatccctgtattcctgggaattctcttctcctggattctgttattcagctctgtgtttctccctccatatctactttgtgaatttctctacatcttcacctgaatcccaggaagcctaaggacatgctgatgcttcctcagttctcatgtcacaccctgttccctcctcctctatgatcccaccaggtcatcctgcatcagaaccctgagtgcggcagaggcttctctggcctccttacccccagtggcagaagggaggaagggaggtcccctgtggcctcccatccttgtgctcccattagggtcagcatgaagcaggaatgaggctgtctatatcatcatggcattcccaacactaaactctgtgcccaggagaaggtaggcactcaataactatttgacaattgaagaactgcctctcaccacactggccacattgtactggactcaggatggggctgaactggaagagtcagctgtgaacctgctcttgtctctgccctcagcctgagagctgaaggggaacctaacagggagagcacccatgggcagggaaggtacattagtagcctcatcctgtttgtgaggctctgctcagccttgggaatccctgtttattcaaggcagagaagaaggaaaacaattaaccaggcctggccaacaggcagcatctacaaggcgatgagttgagggccagatggtcagagttggttctggcatctctcaggcgcctctctccatgttgcccttttttgcgatccaggggtgaggtttcaccccactgagcccccacccatctagatgggctctgctgagagaaaaacccattttctagatgagcccactgaggctcaaggggcacatgtacttggtgatgcaccttcttcctttagagactggtcagcctagaacaccccctctcgagtggccttctggtccctcatctgcccagccccacccagatctccatgaacctgagctgtgtgagagaagagggaagagtaggaggaagggaggagtccaggccatggtgtggatgttgcaggaacccctgggtcttcaaactgaggctggacaccgcaatgttctttttatctccctcaaattttttggtaaaatgtcagtgcttgtctggtccattattcaaacctgattctttttaccaccatcataggcatacatttctgagtcttcatcccagagaacagctcctctctaaaggggaggtgtagggtggctgtgagttctgagtttgcccctggggaggaagcacctgctccaccatgtgcacaggcctgtaagcaagagtccaactttgttgaaataggaaccatttgagtttgcttcaggccttgctgacctcagaagtttcacattgtcccctggtgacctcttcacaatgatgttagtggtgatggaacaatgcaggacagaaggccttccttactttctttcaacaaaaaaatggtgtattatctagcctgacagtaccctagctggagacagtgaaaataatttacattttaaacaaataatgtttgttattttttcaatctcatgagtgtaagataaaagtaatcctatctcaataccaaaacaaacaaacacgaaaaaccagaatctgaggagactgaagtgtgttgattgagagacagtaagaataacttagtccagctcccctgcctggctgtgaaatccaatgatccagtgtcccactctacagacaaacctacaggtttttcacccaatgcagacagaagacatggtattgaattcatgagtccccgctgagagtcacaataggctggtgtggcacaatgcattatgggaggcacagaatgaagggacaacatgtattcagtggattctgctctcttatcagactgagtcactgcacagactgctcacagggtttctccactgcattctgcctcacataaataaacaccaagagccataggatattagtcaattatattttctccttcagtgtcatacttgagatctctatcatatttgaaattggactcagagagcttcaattattttgttgcaatatatattatctttacaaaaattacctagactactgtgtttctgaaaaataaatcttacaatttattttacttccatgatggtattaaacttgaatggttagcatatcagccagtagtgtgtctggggctggacaacagagagtgtttggggtccattcctgaagggtgtgtgtgtgctcagagctggcatcatccacctattctgactcctgccctctgctaagtcctcacagctgtgaacttccaaacccctgggacaacacagctccactcctgctcattcccctgatccccaaaggcacagggccctgatcctgacccaaacacagagtgggatcaaaaagctgagaggttgtcacttgcataggtggatttttttcctcaaagagtataaagagagggagaaagattgggagaagctctgcggtagctgtaggcacagaaggcaggaatcaggccaatctccaccatggactggtcccctctcctcctcatactcctcactcactgtacaggtgactagacacaggcccaggggaggagccctgggaagcccaagggactctgctttctcatcttgtctctagaacagtatcaccacttctgtgtctcttccacttccagggtcctgggccaagtctgtgctgactcaacctccatcagtggcaggggccccaagatagagggtcactatctcctgcactggaagtgccaccagcactgggggtggttttcatgttaatgagtactagcagctcccaggaatggctccatagctcctcatttgtgaaaacagccattggccttcagggttctgtcctggttcacaggcttcgctgagcatttctgggctccagtctggggataaggctgactatttttctttatcttggcacacaagcattaatgctcacacagaactgtaggccaccggggaaggaagacaaagatatgctgtctttccagtgacagagtttccctgtgcagcccccaacccattcaccaaataagtgcttaactgtgattttttttggtggacaaaatgtggagtatgagaagcactgaagcaaacatggtctaaataatgtttcccagtcctctctcaattctacccccatatccaacccttggcaataataaattgtcatactgtcatatattgaaataaatatctatattagtccattctcacattgctataaagaactacctgagacagggtaatttatgaagaaaggctcacagtctttaattgactcacagttctgcaggctgtacaggaagcatgaattggaggcctcaggaaacttacaatcatggaggaaggacgaggggagcaagtacatcttgatatggcagagcaggagagagagagaaggggaaatactacgcacttttaaacaaccagaactcacaagaactcactcatgatagtgaatcttaagaacagcaagaaagaaatctgcccccacgatccaatcacctcctaccagcccctcctcagcatgagatttgggtggggacacagagccaagccatatcaattcctcaataccagggtcaggcttccctgggaaccaagtccatcatggatcaggacaggaccaggaacacagcacccactgtgtctgaccaaagagcctcaactgccagatgtctgtccatccacaccattcaattagcacctactatgtgccagccttaggtctaggggctcaaaaacagggtggacaagacaggaagtgtccctgtcctcatggaccagacaccatctggtggaagagatgagacaattgagtaataatatcaatacaataagatgtcatcacttagtgaggagaggagaggagagctcagtaatggtggtagaggagccatcagagggttggacaaggaagacagaggatctgagctaagtttgtgaagaaaagtccagatgcctcagacaagatggacaaggaggtgggaagcatgatggctgtgggtccaactagggtcactgggggagactgtttatacccagcatatgtttgtggggaggagggactgaagcctgggtgaggggagagggctcaaggctggccttaggacatggacaggatggtattgagtcacgctgcagaaggagccttcatgggcaagggggctgggggaggccctgagctcattattccaatggaaatatcaaactgcctgttagcctttgtcaaaggtatcaaagagactttttcattcaagatggcaagagaggaatctccctcttagacttctttgagatattctttcttcatgaccgtttcttgcccctggatgaatgctcacatgggagcaaattacctcctcagtcccaggatttcaatttgcacacaatccccccagaatgatcgagacctgccatccctgacccactgatcaggaattctggccttcaggacaacttgaccagatcagtcacaccatgtcccctgacaccatcgtggtgactggggtgaactgtcagactggtttgggtaatacatgtcctgtccctggagttgcagaacctgttcagaaagataatggtgtggatggagggaggctaattccagccacatcagaaagcaagaaagacatggagaccacccttgagctggcacagcatccttgggtctcacatgtgtctctagcgactggaaaaggaactcagatttaactaattctattttctcatctgtcactctccctttcactactgactcctgaagccccaacaaaagcagcactatgggattatggtcatggaatagaggccttgctgctgaacttttcttttttattctaaaaagtacaacacagataatgcatattaactaaaaattataaaaatgtatttaaatgatgtgacaatgaatgtataaggggttaataggagaaaataataaacaatgttaaaaaatacaaaataccaatacactataagagttatactatgtcatggattgtataaatcagtattgtaaagatggcagtgtcctaggattaatccatcaaattaatataagtgtaattaaaatttcagtaatattttaggaaactgcttaacttattttaaaactcaaattgaaaattgagataaaaattacctaagattatttaccaaaaatttgtaatggaagtgataccagatattgagttatttgaccaagcaatattagctaaaatcatgcatgattgagatcttgacatttacataattctcttaaaaattagagtagataggactgatgattttttatgtgaccttggaaatatggctaactctgttcataaaattaagtagagtacctaattcatacttttattaaaaaatccaaacagatttaaaatataatttagaaaagaaaaagtttaaaaactttagtttggaaaaatagaaatattatttttatttcatatgagaaagtacttcttaaataaacccaaaagtcaattcataaaagaaaatttgaagtatttggttgcaattatttgaagctttttttttcccaaagaggaccacagttggtaaaaagagagaaggatatgcaagagtggaaagacattggcaaggacaaagtattgctgtttgcatccagaagacaactttgaaatgagcgaagacagaaaaaaaggaaacccagtaaaaatgttcaaaggacacaaacaagccattcacgggtctcaaaatgagagcagataaatgtgacatcaaaatatgttaaattccaccagagacaaagagaagggaataagatcttcaagtagaaattgtggaatgagccaagcatgtctgtgcatggggagctttccaggccttgcaaaaagcaaagagagtaagaaaagagcaagaagggagtgagaagcccttttgtagagaaaccaagaaaagaaagtttagagtgttagagcctgggccagaaagataaaagagagagaagaggtagataatgtgggatttgagtgacctttgattcctgtgggcatacttctgagtaagacatgaagccactgagggtggaaagctgttaaatgatattgcaaatttaaataaaaaaaaaagatgccagtgaggatgtggggaatcccaaactctcactcacagcaggttgtaaaaacaaattcagctattttgagcaaagtccctcagcacgaagataccttaagagggtgagcatctgtcttgcaccaagtccactctgtacagagacacaaggaaatgtttatgagaaggtccttactaggggaaaagtataaaaaacaagctagttgtcaaacacaaggggaatttataacctgcagttagctgatggaatgctaactagttggaagtaataaaataaaagtattattatgagtttcaaaggcaataaatatataaataaaattaaaaagccaagagctaaagaaataaattattttaaaatatgaacatgcactataattttttttaagtttataccatgagctatttgaaagttagactggaagcacattatatacacttatgtaagagcctctgaaaaagatggaaacacatacgaaggttaaaagataatttaaaacaatagagagttatttcagtagctgaagatatgagtgccaataaaatgaatgcgattcaaccctgtgagcattgctttcataaaaaaattaaaacagaaaatgaatattaatagatgacttaagtgaaatcacaatgtatgtggtgatacagctgaaagacaaacgttttgttagtaagaagggcatcgctaagcctgatgagtgctttgtttagaattcccagctaccctggattcctctccaacctcatgaacagcttcagaaaagaggatcaggacaaccgatgctcctctcattgaaatgcccggatgtggcagagaggcaggaaatattttgggtctgaggacagtgaggatcatcactgagatgatcctgcccaaatgaaaaccactcagggcctccaagggagttcagccatcagctcactggactaggtttgggatgcaacactgacctgccccgacccagagtcataatgagccaggccacctccacccactgggtcagctcatctcctctttatcttttctccttctgacctgtgagtacccagatcagggtggacaagtaagagacacatagcaaggtcttatgtgaatacagtgactctaccttacgacgtttttgggagatacaaaggtacttagaggagctcagtttccaaagcagtgctccaggaagctggaaatctgcactatgctctgggctcctctcctccatctccaccctcactattcaggtgagaaagaaccttatgtcgggggatccacacccagctctgctccataccccctcactctctggctcactgggttgtaaacctgctctcatggccctctctgtccccctgcagtgtctgtggcccaggcagggcagactcagcagctctctgtatccaagggcttgggatagacaaccacactcacctgcactggggacagcaacaatgttggcaaagatggagctgtctggccgcagcagcaccagggccatgcccccaaacacctgatcaacaggaaaaacagccaactctcagggatctcagagagattccctggctcccggttaggaacatggcatctctgaccatctctggcctccagaccaaggacaagcctgcctattactgctcagcctgggacagcagcctcagtgctcacacagcgcctcaggggaagtgagacgaaaactcaggagctcccctagcttcactcggtatgcgggggcgtcatagagcactgtttaaactaaaccaaaaatgacaagggctggtttccacgtgacaaagtgtgtgctattcaaaactattaaaaataatatcataagttaaaataactaaatctgcagtattaatgaatatttataggaaacattgttgtgaatatatttgtggctagatacttacatgaacatacacatgcattaatcagtagtaaaaatgaatgcaagggtaaactaaggaaatatttattttcccagattttccttctcttttatttggagatgctggactaaatgctcagaggttccggtggtctgcctttgagtgtgtgttcagcagggtcacctcaagcttatcccaccttcttatgacctgggcccatgcctgtcctctcattagaatcccctttccctctgtcacagagctctctttattccttctacagacccagacttgttcctcacacttagttgaggcttcctgggccccacgtccctgtttgcccccaacacccacacaagacaatgatcccatgtgtgtgctcttgttgtgccctttccttatcctctgacatacctcaggcagtatctggaaagaacaaatgaagtgggagcgttagcttgtagttgaaaatgatttttgatattttggggaaaatatctggtttaaagatagttttccatcgagataaaaatgcatgtgtgacagcaccacatttctaatggcggaccaaagccccccacatctttgccccccacatggctccagggacattgacttgttaatatacaacccaggagagagcactgtgtcctatgcaactgcaatgcagaggcaggtttctgcccgctcctccaatgaagtgagtagcaaccccaaccccatcttcacccatcatttagatgacccccatacaaccacaacatagaaacacattgatcaaagggcctttttctctttgcagagacccctatttgtttatttggcatgtgagattttagacttttaccaacaattaaaatatactttattagaaaagttacacttcttaagaaactctgattcttactgtgaagttaatacctaatgcatcctataagcatagtaagtggaaaattgttctgtaaggagaagattaatcaatgaaataaaatacaagtatttgagagcaatctaataggtaaaagattagaggacataattgtgaatgccaggtgcaatataaaggaaatgtgggccgggcatggtggctcaaccctgtaatcccagcactttgggaggccgaggtgggcggatcacctgaggtcaggagctcgacaccagcctggccaacatggagaaaccccatctctactaaatatacaaaaattagccaggtgtggtggtgcatgcttgtagtcccagctactcaggaggctaagggaggagaatcacttgaacccaggaggcggaggttgcagtgagccaagatcacactattgcactttggcctgggtgacagagtgaggctcagcctaaaataaaataaaataaaataaaacaaaggaaatgtgaatacctagagttgattaaattgtggcccctcaccttcaacactcgaaaagctcagagtgggtagaaaagcttgttgagttatcttctgatgtcattgacaagataaatcagggacaatagaaggaatatgtggaaagaggtgccagaggctagaggggaaagtgtgaagtagccagcagagaggagcctgctggctgactacttgtgttagtagtagcaggtggtgttgacgccatctcccaggggaaaaccctgggaaacaggaaagctaaaagcaggctcaccatcctcatccctaacagaaccactgaagtgagcacaccagagtgtggggttccctcccggctcttcagatgacattgttatttggcaccaagctgatgttagtatgttctttataaatatatattgcacaaagaattgcataaaaccttcaataatttaatgaggactttctcacttaaaaaggtttttatgtctcttctgtggcccccataggtagccggggatccctcactgcatttcagtctgacaactcatcacatggacagagtccaccgtgtgtgactgtgtgtctgtgataataggtggcaaagcttcactgtcatagccgcacctgcttcattgcctggtgcttgcctttctgaaataggaaaataaactcttaccaatgtgtcataattaggttctatttaaaatctcctaccaaagttaagagcagcctgcacaactggtccacaaaatgagaaacctccaatttatttggactcttttctctaccctacccagtgatccaactggtcaccagccatgtggattctctctccaaaacgcttttaaattcaactctcctgtttactttccattctcatgtcttatgtcaaatattcatgtcacttacctagttctgatcagttctctggctccatggacagctcccccaactctgccttcctgaccatctctgggctgcggattggagatgaggctgacttctcctgtcagtctcatgatgaaagctacaatctcacagtgctgcaggcccattgggcagtgacaggaaaactccccagagcaccctcaccctgagtctgccatcagcctctccccaccagcatgggttgctttttcctgtcccctgtttgaatgtttgaattcaaattttctgtttatgtgtctctctattttctttccaaaatacacaactttttctttcttgtcttcatggatggtttttctggtccctgtgaaattactttatgaagaatatttagtttaaaacatagtttctgaacattgtcattttaacattgtgcactgggtcattcattgtgtgaggggggctgttctgttcatggttggacatttataagattattgggactcacacatcagatgcctatagcaccctaattcccaaattctaacaaacaagcaaaaaatgtagacattgcaaaatatcctagggagacagcactgcagaatcacccttgtctgagaaccactggattaaaaggacatggtttcacgtattgggcagccttttgtgttgaaccctccttatcccattccactgaatataaggctacatgcattatatctcgatggttccaaatttcctcttaaacaaatgtgtgggatacaactccaaaggttatgttgacagatgaataatcctctgaacaccattagttcagaaaacctgctacccaatgtacagcatctcttgctgaccagagtgtggagtgaaacatttgaccaaactgtgtgcataattgctaattcaaatttttaggtaaaacacctaaaacataacacattcttctctacttatcctcttaggggttgcttttcaagcatggtgtacaaaattatgacaaggcctcgtatgtgtggagtttacattttagaatgggtagacgacagtagacaagagcagcctcagaactgagcagtcagtgaagtcctttttttagccctagcgctggatgcaaattttaccagctgccatttgtgtttttgggcttgctccacccagtacagtccccatgaactgcatgttgatatgtatatttcaaagttaattaattaaaactaaataaactttaaaaaatattcctcagccacaccagcttcatttcacctgcctcctggactcatgctctccatccatggctctcatgctggagagttcagacacagggcatctccaccatggcataaagttctactgcagagcacagtctgtgacaatctatttaacacttccttaggccagtttcttcattacctgtaatggggatatagtaacactcaagttctcttcacagtctggaacactattctctgtgggagtattacctcggccccttcttcctacagaacggaggagtgataatgtaactagtattggccaataagatgaacagaaatgagaggtgtaatttctgagcagtagatgtaagattagcctgtgctttgtcaagttctatcatctctgacgtaacacccacagtgttctcacagaattctctcaaccatcctgcatcctgggatgaaggtgaagtgaactgaagccccaagcatttcaatcagagatgggaatggtggaggagtgagaaatatacattcgttgtgagtcaccaagatttctgtcaatttctcactgcatccaagcctagccagtactgagtgctatggaaattataagtgaatgtggggagccacaatgacaaaattaacatctatctataaatatatataatatatattaattacattatatcatatactaatattaatatataataaatatataatatataacacttacatattatataagtatataatatataacacttacatattatataagtatataatatacaataattaatctatattacatataatatattaatataaatatatatacataatttgatttgatgcaatactgtgaacatttagtagactacggagattgcatgatgtttcattttattcactggcaaatatttaattaagctgtcaccataataaacattaaaacacacagaattgacaaaataattctcctgagctgtggatatacaagttagacaactgattagaagcataggttcactcctgtgccatttgtggaatttttacaacttatttactttaagtgatgattttaagcataattggtttttgttcttgctttttatttattcaagcagaagaaagacacaagaatgataacccacatacatacagagtagtagaatggcaagagctaattattctcaaacacaaattcttaaagataaatgtaaaatatttgaattaaacattttgctatccaaaaaaaggtatgccgtttttttcctgagtactccagggcaggaaagtatattcatcaatccccctggtgtccgctttcttaacacattgttcatattggtatatatttttttcttattacttaacttactcatcctatatattgtgtttcctaaatatatttcaaattcattctcagccttgtgatttccctcgccctcattatgtcccatgtcctgctggggctcccccataccacccctctcctcatctgtaatgccccctcccagttcctgccctcctgggaactgctgtgctcttttctgccctgagccttgttacctccttcttgtactacctatttgtctcagtgagctcctcttccattcttcaaaggctccagagccctagagaagagcatcatctcaaaaaatttcccaagaagctgcaagtaatgagagtgtctaagaccactctttctgctttatggcaattttatatttaacgtggtattgagtcttgctgaattttcagtctgaagtcataatgtgctcaaatatacaaattccagagacacagagcagaatggtggctgccaggagctgaggggaggaggaaatggggagttgctggtcaacaggtgtaaagttttagttatgcaagaatatgttataaagatgtgctgtgcaacacttatctaaatattaattattaatcaaacaaaaaattcaaaattattaacacacatttccccctgggtttactggacagatgattttatatttgtctctgctaagtagactaaggtgtaaggatttggcacgaaagttgtaaaccacaaacccagccaaaaacaaaatattctttatacagtttttcaataaataaaattaatttaatattgctagtttaataaaatagctgtgtcttctaagttatagataaattttgcatatttttcactttaaggatcttacttaggtaaacaactgcatataccaactactaatattactaagaaaaaatgatttagagaaataaaaataattttcttgtgtctcagttttcacatataatctaaataaatttttaagtaactaaattagatgaatataaatgaagtaaacacttctatctaaactttttgtataatttaaaatcttaaaaaataaattaaataataggtactcttaaaaaagtgtaggtcatttaaaattaaaaatatatattttggatatagttataaaaatattaaaatagttctcatgtataaaagatgaatttatgagagacaattcaaagtttcttacatcctaggttttgagtaaaaattattgttaaaataattaaaaattctaattaatatataattcaatatataaaataagacaaaaataaaaatactaaatatatgtttttaagttaaaaaagcaaagtcataaaatatatgctttattaaaataattttgccaagttaagatgttatataatggttacttataaagcaatataaaataaattagagagatataaaatattataaatatagatatctttttgtaaaaaacattagaacataattttatattgaacaatcttatataatttttgtcctaaaataagatgatttactattttaagaagacaaatcaaaatgtcccaacaagtcttagtctatgtaaattataataaaatacatttgggaattatgtcccaacatatcttactctatgtaaattatagtaaaatacatttgggaattatttaataaaattaagtataattaacaggactataattttaaaaattatgtcttcctaaatattaaactttaatattgaaaatacacaaatacaaaactgaatattttgattttctatgtccaaacacagttttcttaatattaatttactctaaataaaagatttaaacattgatttttaattttaacatctatttctctttaaaacttctcaaaattacacttcaaaagttcaaattttgttaatattttcacacataatttacagacttttattgtcatacctttcaaaaaaatgtaatttttttacttcactgggacaataactcttttctttaacctttttttaaattattatactttaagttttagggtacatgtgcacaacgtgcaggtttgttacataggtatacatgtgctatgttggtttgctgcacccatcaattcctcatttatattaggtatttctcctaatgctatctctcccccagccccccacccccaaacaagccctggtgtgtgatgttccctgccctgtgtccatgtgttctccttgttcaactcccacttatgagtgagaacatgcggtgtttggttttctgtccttgtgacagtttgcttagaatgatggcttccagcttcatccatgtcactacaaaggacatgaactcatccttttttatggctgcatagtattccatggtgcatatatgccacattttcttaatccagtctatcagtgatggacatttgggttggttccaagtctttgctattgtgaatagtgccataataaacacacatgtgcatgtgtctttatagtagcatgattcataatcctttgggtacatacccagtaatgggatggctgagtcaaatggtatttctagttctagatccttgaggaatcaccacactgtcttccacaatggttgaactagtttacagtcccaccaacagtgtaaaagcgttcctatttctccacatcctctccagcatctgttgtttcctaactttttaatgatcaacattctaactggtgtgaaatggtatctcattgtggttttgatttgtatttatctgatgaccagtgatgatgagcattttttcatgtctgttggctgcataaatgtcttattttgagaagtgtttgttcatatcttttacccacttttcaatggggttgtttgctttttcttgtaaatttgtttaagttctttgtagattctggatattagccctttgtcaggtgggtagattgcaaagattttctcccattctgtaggttgcctgttcactctgataatagcttcttttgctgtgcagaagctctttagtttaattagatcccacttgtcaattttggcttttgttgccattgcttttggtattttagtcatgaagtctttgcccatgccaatgtcctgaatggtattgcctaggttttcttctagggttttttatggtgttaggtctttttttttttttttttctttgagacagagtctcgctctgtagcccaggctggagtacagtggtgtgatctcggctcactgcaagctccgcctcccgggttcctgcattctcttgcctcagcctcccaagtagctgggactacaggcacctgccactgcgcctggctaatttttttttgtattttttaatagagacgtggtttcaccgtgttacccaggatggtctcgatctcctgaccttgtgatctgcccgcctcggcctcccaaagtgctgggattacaggcgtgagccaccgtgcccggccatggtgttaggtcttcattcaagtctttaatccatcttgagttaatttttgtatactgtgtaaggaagacatccagtttcagctttctacatatggctagccagttttcccagcaccatttattaaagggggaatcctttcctcattgctttttttagtcaggtttgtcaaaaatcagatgattgtagatgcgtggtgttatttctgaggcctctgttctgttccattcgtctatatatatgttttggtaccagtaccatgctgttttggttactgtagacttgtagtatagtttgaagtcaggtagcatgatgcctccagctttgttctttttgcttaggattgtcttggctatgcaggctctttttaggttccatatgaactttaaagtagttttttccaattctgtgaagaaagtcagtggtagcttgatggggatagcattgaatctataaattaccttgggcagtatggccattttcatgatattggttattcttatctatgagcatggaatgttcttccatttgtttgtgtccccttttatttcatcgagcagtggtttgtagttctccttgaagaggtccttcacattccttgtaagttggattcctaggtattttattctctttgtattaattgtgagtgggagttcactcatgatttggctctctgttagtctactattggtgtataggaatgcttgtgatttttgcacattgattttgtatcctgtgaccttactgaagttgctaattagcttatggagattttgggctgagatgatggggttttccaaatatacaatcttgtcatctgcaaacggagacaatttgacttcgtcttttcccagttgaataccctttatttctttctcttgcctgattgctctagccagaacttccaacactgtgttgaataggagagggcatccttgtcttgtgctggttttcaaacagaatgcttccagtttttgcccattcagtatgatattggctgtgggtttgtcataaatagctcttattattttgagatatattccatcaatacctagtttattgagagtttttagcatgaagggctgttgaattttgtcgaaggccttttctgcatctattgaggtaatcatgtggtttttgtcgctggttctgtttatgtgatggattacatttattgatttgcatatgttgaaccagccttgcatcctagggatgaagctgacttgatcgtggtggataacctttttgatgtgctgttggatttggtttgccagtattttattgaggattttcgcatcaatgttcatcagggatattggcctaaaattctctttttttgttgtgtctctaccaggctttggtatcaagatgatgctagcctcctaaaatgagttagggaggattccctctttttctattgattgaaatagttttagaaggaatggtaccagctcctctttgtacctctggtagaattcggctgtgagtctgtctggtcctggactttttttggttggtaggctatcaattattgcctcaatttcagaacctgttattggtctattaagagattcagcctcttcctggtttagtcttgggagggtgtatgtgtccaggaatttatccatttcttctagattttctagttttcttgtgtagaggtgcttatagtattctgatggcagtttgtatttctgtgggatgggtggtgatatctcctttatcattttttgttgtgtctatttgattcttctctcttttcttctttattagtgttgctagcggtttatcaattttgttgatcttttcaaaaaaccagctcctggattcattgattttttgaagggttttttgtgtctctatctccttcagttctgctctgatcttagttatgtcttgccttctactagcttttgaatgtgtttgctcttgcttctctaattcttttaattgtgatgttagggtgtcgatttgagatctttcctgctttctcttgttggcatttagtgctataaatttccctctacacactgctttaaacgtgtcccagagattctagtacgttgtgtctttgttctcattggtttcaaataacgtctttatttctgccttcatttcgttatgtacccagtagtcattcaggagcaggtttttcagtttccatgtagttgagtggttttgagtgagtttcttaatcctgagttctagtttgattgcactgtggtccgagagacagttttttgtgatttcttttcttttacatttgctgaggagtgttttactaccaattatgtggtcaattttagaataagtgcgatgtggtgctgagaagaatgcatattctgttgatttggggtgtagagttctgtaggtgtctattaggtctgcatggtccagagctgagctcaagtcctggatatccttgttaaccttctgtctcattgatctgtctaatattgacagtaggatgttaaagccttccattattattgtgtgggagtctaagtctctttgtaggtctctaaggacttgctttatgaatctgggtgctcctgtattgggtgcatatatatttaggatagttagctcttcttgttgaattgatccctttactattatgtagtggctttctttgtctcttttgatctttgttggtttaaagtctgttttatcaaagactaggattgcaacccctgctttttttttgctttccatttgcttggtagatcttcctccatccctttattttgagcctatgtgtgtctttgcacatgagatgggtctcctggatacagcacactgatgggtctgactctttatccaatttgccagtctgtgtcttttaattggggcatttggcccatttacatttaaggttaatattgttgggtttgaatttcatcctgtcattatgatgttagctggttattttgcccgttaatgatgcagtttcttcatagcttcaatggtctttaccatttggcatgtttttgcagtggctggaacctgttgttcctttccatgtttagtacttccttcaggagctcttgtaaggcaggcctagtggtaacaaaatctctcagcatttgcttgcctgtaaaatattttatttctccttcacttattaagcttagtttggctggatatgagattctggtttgaaaattcttttctttaagaatattgaatattggcccccactctcttctggcttgtatggtttctgctgagagatccactgttagtctgatgggcttccatttgtaggtaacctgacctttctctctgggtgcttttaacattttttccttgatttcaaccttggtgaatctgacaattatgtgtcttgggattgctcttcttggggagtatctttgtggtgctctctgtatttcctgaatatgaatgttggcctgccttgctaggttgagtaagttctcctggataatatcctgaagagggttttttttttttgtttttttttttttggttttttttgagacagagtctcccactgtcacccaggttggagtgcagtggtgcgatcttggctcactgcaaactctgcctcctgggttcccaccattctcctgcctcagcctcccgagtagctgggactacaggcacccaccaccattcccggctaatttttcatattttttggtaaagacagggtttcatcatgttagccaggagggtcttgatctcctgacctcatggtctgcccacctcggccttccaaagatctgggattaggaggcatgagccaccgcacctggccctgaagagtgttttctaacttggttccattctccccgtcactctctggtacaacaatcaaacatatatttggtcttttcccgtagtcccatattttttggaggctttgttcatttcttttcactcttttttctctaatcttgtcttctttgtttatttcattaatttgatcttcaatcactgatatcgtttcttccacttgattgaatcggctattgaagcttgtgcatgcgtcacgaagttctcatgccatggttttcagctccatcaggtcatttaaggtcttctctacactgtttgttctagttagccattcgtctaacctttttcaaggtttttagcttccttgcgatgggttagaacatgctcctttagctcagagaagttcgttattaccgaccttctgaagcctacttctgtcaactcgtcaaactcattctctgtccagttttgttcccttgctggcgaggagctgtggtcctttggaggagaagaggcactctgttttttggaattttcagcttgtctgctctggtttctccccatctttatggttttatctacctttggtctttgatgttggtgacctacagatggggttttggtgtagatgtcctttctgttgatgttgatgccattcctttccgtttgttagttttccttctaacagtcagacccctcggctgcaggtctgttggagtttgctggaggtccactccagaccctgattgcctgggtatcaccagcataggctgcagatcagtaaatattgctacctgatacttcctctggaagcttcgtcccagaggggcaccgcctgtttgagacgtctgtcggcccctactgggaggtgtttcccagtcaggttacatgggtgtcagagacccgcttgaggaggcagtctgtccattctcagagctcgaacaccatgttgagagaaccactgctctcttcagagctgtcagacagggacgtttaagtctgcagaagctgtctgctgccttttgttctactatgccctcccccagaggtggaatctacagaggcagtaggccttgctgagctgtggtgggctctgcccagttcatgcttccctgcctctttgtttacactgtgagctactcaagcctcagcaatggcaggtgcccctccccccatcaagctgcagtgtcacaggttgatctcagactgctgcactagtagtgagcaaggctctgtgggcctgggacctgctgagccaggcaacgggagggtatctcctggtctgctggttgctaagactgtgggaaaagcgcagtatttggtcaggagtgtaccatttctcccagtacagtctgtcaggcttcccttggctaggaaaggggaatcccccgaccccttgtgcttcccgggtgaggtgacaccccaccatgcttcagctctttgggttgcacccactgtccaactagtcccaatgagatgaaccaggtacctcagttggaaatgcagaaatcacctgtcttctgcgtcgatctcactgggagctgcagaccagagctgttcctgtttggccatcttggaagagaccttccctgtgtattccgagccttctgcattctgccatcactgcagcctcctcatgttggatggacctgatatttttgcttttctagtaattcagaaatcctcagtggaaaggctgtttattaatatgagttatctccagacagggcaaaggtgtggtctatggatgctgtggattagcaatgaccaggctctcaggtgactccactcatgtgattttcacagaaagactgctgtctggccagtgagcagcacagggcactgtgagtcacactcagtgtctgcacagtgaaaacccaaaacttgccacccccccaaactccccagggctgggtagatggagtctgcactcactgacacagatttagcagctagatatggtcccagcacccccaccttcttccaagtcctgcgtgccagacaccccgacaacagctcccagatactgataaatccatggggagagttgggggtaggcagtgggagcaacacacttgcatccataacccctcctttgtgaggccactgaaggggataagagaggcctggagaagccactccagttctggacctcaggagggctgtgtccactgtgacctgggcacctattctcctgtgatattctatcatttctcaggtagggacaggtctcacgtcctggggaagccccctagcctgagttcttgccctgtgtttcactctcaccctttgtcctgattcctcacccacgatcatctttgcttgcaggttccctctctcagcctttgcttattcagctgccctccctctctgcacatctgagaaatgctataagacttccctgtaccccaagtagtggctgcattgttggaggctgtcacatattcttgtaccagcagaagtcacggagccttccccagtatctcctgagatactactcagactcaagtaagcaccaggactctggggtccccagtcacttctgtgaatccaaagatccctcgggcaatgtgcagggattctgcacatttctgagcagcctgagatcaagtccgactattactattttacatatcacagcaacagtggcactttcactgtgctccagacttacggggaagtgagattagaacctcccctgcattctctctgccttgtgcaggcaacaatacactgtctgggaccgagtgtggctcatcagtagcagctttgttgtttgtatttttcattcttcagtacagggtgggacctttctactggcctccattaatagtgagagtcaaacaagacagtctgtgggtgactccaaagtctaactcagggtttccttatgttagttagcttggactactcttggctcctccccagagatctcaacttctctggaattctccaggtgccacaagcactgatttcagtcttggccttgcacctcccctgagcagcttctgactctcctctcattacatctccatttatggcctgtcacccactcaatgtgttaaaaggtaaagcattttgcaaagtacttatcctgaactttagccccaaatccacccagcttccctagcccaggccagctctgcttcttatgaggctgatgagaggtacaagggctgcgacccttgctgagtccattcctgaaaatgcccccaataaagcctgattagcgccaatgccacaggacattgttctgtttcctttgcaggtggtgcccagtgaggaaagttcttcctcctgaatatgaatattttggagcatgaaacagctgagctgatctggggaggggaggcaaccccttgtgatggtggtcagattgcttggttgggattgtcacagaccatgtgataatgggattatattgcatatcacagatgcgctggaccctcaagtgtgctggggaactctggttaaagaatagaagtgatccctttgttcatattcactatgctggatgcccttttgagatccctgcaggacgctaaccctctgactgcggcagccttgccctttgatctgaagcttttatcatacattgtcctgctcaggggatttgggtggggcgttactcctatatatcatcacaagaaagggattctctggagactaaatgcaaactggaatatcccctggaggctgtccccctgattgggaaatatgaagagactaggggtgctcagtgtttaaaataaaacttcagagagtagagtctgagtgtaaacccttcaattccatttaatctctacaaatgtatataatgtcaaaacatagttatgtcatatatttacacatgtgcacacaaatctattaatacatgttcataagttcacatatatgctttatgttatacatatatgcatttatacatcaactgatgttattataatcatagttttacagactcaattttcctttgggtttttccacatttccccactttctttaacacttatttcttgaaaattttggtggctgcttactgagattttactaaaaaagagcttcagaatttcatttagagtagatcttgtggcaaattctattttttttgtctgaaaaaatggtattttttctcttttttatttttaaaacttatcttgaagcataatatgtaaagtgaaatttgcagatcttaattgtaaatttcagtgtgctttttatgaacacatatactcatgtgccccatgcgtactcacaacatttccattactgcagaattaaaacattttgttctagtcaatgaaattattccattacagaatagatatgtgtaccacatagaatgtgtacctgagacacacttcccctggggactccttataaagtgcggtgaattgtgtgtcttttttcccattgaggaggccaatgtggaaaactaaagactgagatgatgtagaaaactgccctgagagggaacctcactctgccctgaggtagggagccagcactggtcaaggccccggtggaggatggcacctctgttgggtccacctggcctctggtcacaggcacgatggacctgggcctgggcagcagggggcgctgtggggctggcacttagagtctgtggggctcttagctgggaaatgatacctggccctggcctctgcctagggctcactggggccagcagctgggtcctctctgggccctttgggagcctcagtccaggtacatcccaggcctactcttcccagaaatgacccagccactgggactgcacacgggcccagggaggggcacgcttgggcaggggaagaggagcacatttgcatgaaaggcccatctctctcctctaaggctagagggtgaacacgagagacctgccgcgtggcttcctctgcagagatccggggagtctgcaccatggccttgaccccactcctcctcctcattgtcctccttcactgcacagtccaggacggcacaaagcatcctgatcccccagctcactgacaccacctcccaactcatgccagaactgtccttccctgttctgctttattcagtgtataatggctgtctgtgttttcgggatccctctggcagcccgtgccgactcagtcgacctctgcatctgcctccctgggagccctggccaagctcgcccacactcagcagtcagcatagcagctatgccattgaatgctttcggcagcagccagggaaggcccatcagtacctgatggagcttaagagtgatggaagccacaccaagggggctgggattcccagtcactagttctcagtctccaggactggagctgaccactatagtgtcatttctacaatcccgtctgaggatggagctgactatatctgtggtacagattgtagcattggtgtgccgtttgggtaaagcacagataaatggggaaatgaggcaaaaactgtttttctactctgctaccaaggttgaaaaatggctctcagaaccagtgtctgctgacctgcatactcaaatatgttatgtgtgtgtgtgtgtgtgaatgcgtgtgtgtgtgtactttaattttacgagtagagagccagatattttctgattcctgcttccagttcccttggaaacagctttttaggccaggccttctagggagtgcactctgatctgtaactattgtgcaaatattacaacagagcctgtctcctcctgctggtctggtgtattgtggctatataggggggtgcaaagaaattctccttttcatattcagacactgggactcagctgcatacctcagtcctgtcttattgagatcatttaaatgatcaatcttagaagaaaacttctgacttaaataaattttagaagtctatcaacatgctagaaagcatattccagataaataaaaatagaataaagatttatagagattgagatgaaaagctttaaaccctttgggggtttctgaaggtattctcaggtgttcagtgcctgggatttgggagtaagggataaggaggagaacttatttccaacacactgaagatgacaacagataagcagaaagttaccaaagaaggaggaatagaaatagccatgaatatcatcctggtaaccctgatctggaatgaaggatttcatttatttacttatttatgtatttattttcaaaataagtacatctcatggagtccttggcaaaagctgaaggaagtattgcttcaggaaatatctgtccagtaattaggaaactactaatgtgattgagcagagacttcattaacttcacatgcaaagaatacagacttgcagaaccctcctggaaaaccatgaaacaatacatcatcaacaataacaactatagcaaaaacagcaacaacatcaaccaaaacgctttacaaaaaagttctaatttccagaactgtcacattatattatttaaaatttccatttgtcaaagcaaaataatgaggtaggttcaagacacaggaacatattgccatatataacggaaaataacaaagaaaaaaacattaaaaaaacaaaaaaattaaaagttgacaaaaactattttcaaagaggcagaaacactggtcttattcgaccaatacttcaactccattatttctccatttgctcaaagaaattttaaaaatgtaaaaatgttcaaaaaagcatgaaaagaatgtatctccaaataaagaatattaataaaagatataaaagaaagagtcattgaaataaacatagattaattgatattatcctattacaggaatagaatgaaataagggtggaaaaatacgcaggacctaaagaccctcttgacaccatcaagtgtaccaatatacacataatgaaaggcccagaagggtaagagtgaggaaaagaaacagaataatgtaattgaaaaatggtaaccaaaactttcccaaatttgacaaaaagaaacatactcaatccctaaaaagttcaataaaccttaatcagcattaatcggaactcatagatataaaacttatggaaagcgtcatggtgggataaagcttactaagttctaaaaagtcaaatagacaaagacggttacaccaaaagtgtgtcaatttctgtttcctgccatgatgcaatagatggagttcttacaccataaacaacactttaagacataatcgagtgcatgtaatgactatttccagacagtgaatattggccaacagggataacttgattatgtaacctcagagaaaggaccctaacacgcaaatgagcactgcagtggacacggatttctttttcttcactttttttttttcgagttagggtcctgctctgtcgcccaggctggagtacagtgatgtgatctccgctcactgcaaactctgcctcccaggttcaagcaattctcctgactcagcctcccgaatagctgagattataggcactcaccaccatgcccagctaatttttttgtccttttagtagagagggggtttcgccatgttggtcaggctggtcttaaactcctgactgatctgcccacctcggcctcccaaagtgctgggattacaggtgtgagccactgcacccagccaacacagattttttttttttaattatactttaagttttagggtacatgtgcacaacgtgcaggtctattacatatgtatacatgtgccatgttggtgtgctgcacccattaactcgtcatttaagtatatcttttttttttttttttagacggagtctcgctctgttgcccaggctggagtgcactggctctatctcggctcactgcaagctccgcctcccgggttcacgtcattctcccgcctcagcctcccgagtagctgggactacaggagcccgccaccacacctggctgattttttgtatttttttagtagagacggggtttcactgtgttaaccaggatggtctcaatttcctgacctcgtgatccgcccgcctcggcctcccaaagtgctgggattacaggcgtgagccaccgcgcctggaccacagatttttttttggagacaatttttggcccagaaggaggtggtgaccaagataatcgtgagctttttacacagctcagaacacacagatgagaagtcagaaaaacatagatggctgagactttcagagcaagacactgaaaagcaggcagctacacagagcaaggtccctgcgctctgcatgaggcccctttggatttggttgggcaaaacatgacaccttgcagggggctctaatttaatgaataggccttcccctactgggaactaagattcatattttttctctctgtcctgttttttcaccactgtatctacaaaccctaggactcagcctagcgcaaagagccaattaataccatgtttgttgaacgaatatgtgaattcacctaaatagaattctcagtaagagaaaaagatctgaggaaaataaagtgatttttactgctttatgtgtattttgagtttgggttgtgaattgattcaaggggatatattaaattagaatgttgacctccgtgtttagagaacaagagaggaatatgaacttgagtgctggaaaggtgaccagcaggatggactgggtcccatgggtttgtgcagagaccatggaaaaggatgagcctccagttactaagtaattgaacaagatatattttaggtaaacacttattttataatcacctgttggaatgggtgataactgtagatgtgactgttattcattgactctctgaaaaaattatttattcaaggcaagaaagattggagaatagttttatcttgaaacacttttcataaacatgacatattcttgctaaagcagataccatattcatctccaagctggaagggttatctcatcttcccaaacatgcaccccttatagtatattttatctgcttttatggcatgtccactttcttggtcacagacattgtaagcctcagagtttaatttgtttctctactgtatacgtatggcacctccagttggtcactgaagctggagattgaaatcctctacatcccccagatctgtcctctggctctatggcgctgtcctgttccatcagacctacattgcccttccttgtgtgaaccctaacctaagtccaatctctactccatgaaagctgtctgtaacagaagcctggcacctctttctcctttttatgaaataaatatctatttctatagatagatctagatctagacattaatagctccaaatctgtagaggacaaagtgcctagttctcaggtgataaccaacccacatcttctgtcctggaatatccagccccagatatcaccccattttctcctccctgtctcgctaaatatatattcacccaccaagccactgggtttgtagtaatttgtcacaacaagaacagaaaaatatgtggaaaagaatggaagaggagtgttgctgttaaaaaaaatacttaaaatatggaaatagttttggaagcagacaagagatagagtttggcagaattttggaaagcatgttagaaaaatcctagattgctttgagcatggtgttaatgcagatatggttgctaaagacttggctgggatgggctcagtaggaagtcagaagcatggtagcgaaaaagctacattttctttcttttttttctttctttttttttttttgagacagggtcttgctgtgttgcccaggctgcattgcagtggtacaatcttggctcactgcagcctccacctcctgggttcaagcgatttttgtgcctcagcctcccaagtagctgggactacaggtgtgcgccaccatgcccggctaaggttcgtaattttagtagagatggggtttcaccatgttgtccaggctagtctccaactcctgacttcaaatgatctgcctgcctcagcctcccaaagtgctgggattacaggcatcagccactgtgcctggtctagttacatttttcttagcaaatacctaattatacatctacagactggaagtagaaatacagccagtaccagcactttgggagaccaaggagggcagatcataaggtcaggagatcgagaccatcctggccaacatggtgaaaacttgtctctaccaaaatacaaaaaaatttagccaggtgtggtggtgcatgcctgcagtccaagctactcaggaggctgaggcaggggaatcacttgaacctgggaggtggaggttgcagtaagcccagacagatcacaccactgccctccagcctggtgacagagtgagactccatctcaaaaaaaaaaaaaaaaaaaaaaagaaagaaagaaaagaagataaaagaaatacatccagtaaaggagctcctggtgcactgatgggagttcacagggaattaagagcgctcttttgacttttgtgggaaaaccggaggaaaggggatcattgttttttggtggaaaacaggttggctggattgtttcatgcaattgtatggaaagcagaacaggtgagcagcaaacttggatatttagctgagaatatttccaagcaaagtattaaaagtataacctcattcattcttgctgcttacagtaaaattttgtgataaaaaatgtgaagtaagggaggaagtcttaaatggaaagaaactagggcatgataattgaggagattactagcatatttcgccaattacttgctcattccctcttttctgggagaccctaaaagtaactcatcatttactgttttccatccgcttccttccttgtctagaatatgggcctggaccctccacaagatgcgtagagaagtcagaaggccttgtcctgtgcaagcattcaagcatccactcctcgcactaatatttctagacagcaaactggtgatccttgctcacctgaaacatacatacgggttggaggaagacagaacctaacacaccttacctgtgtgatgttcagggctggcctctaacttctgagagcttcatttcactccacttcctacaaggattgctcatgccctccttcacttgtggtgaagttcaaacaatacattagatttgacatctttgccaagagctgtagagtgcaaggtgctcacccagagctacatcttccagcagatgaggctcacagttaaatcactgctatggtgtccgtcaactcaggcactgttgtgccttttcacagagcatcgcctgttaactgcttcacccacccactgtgggagtccaggtaggaggacaatgcctccccactagctggctcctctctggttgtacctgtgggtcacacatgcaggtgacggtttgtactacctcctacctggctgtactccccaaagccagggctgacacccctcactgcacttccattccatcccatcagtcacaggaggcagctattggctcattaccctttgcaaggagttcaagggtagaagtggcccatttataagaatatttatatggactatcttgtatatcctgtgaatcatgatactgttaaatcaactctaatacatcatgtttatgtccactgaaatgatgatgataaaaggaaaagtgatatctggacacgcagactgaaaaagatcccaaagattctgcacacaaggcccctattctctggggacatgtgggaattcaatggtcttgctgacatatagagtttgcttcactctgtgtcaatctgaggcatttgtgacctcagagttgtgttttctaagaatttaccatgtgtggcagctggacttcaagttatacctaaatatctctgtctcctagcactcacatccctgtacatattgaaaagggatcactagtacaattgataggatattgagaaaatgactgatgccaggccataatacactttgagttttgcgttctgctctctcagatcacttgctttggggaaagccagttgccatttgtgaggacactcaagtagtcccacagggagtttcatgcagcaagaagctgaggcctcctgccaccagctttgtggctcagtgaaactgtaagttgattctattgccttggtaaagtcttctcatggctttagttccccccactgaaatcctattttcaacctcatgagcctatctgagccagagccaccttgctaaactgctcccaggtttctgacccacagaaactgtgggattgcacatctttgcagttgctaagttttgtagtatttgatgtgaagtaattgaaactggatgcatcgagagaggggaatggaggtggcagagtgggtggaattaggcctggaggtctgctttcagtgagatgtgatgggaccatggcagacacctccctgtttctgattccagtggattgcttactgggcctggcctttttcttatactccatgacttcattgttaataccctacaggaattctgtatgcgctatgtcttatccatcttccttgggtaaatatttaaatataaatgaatcaaaacacatgggccactttctaatcttgattgttcaaaactgaattcctcaaattgaggggtatgattttctttattgtccttggtgctcgtctgccagtgtctatcaatggtagaatcatgtaaacagtcccctcccctattttgtttcactctctgaggacgagagagaagtcttggccttcaacagaaaatggtcaaactagaaagagtaacacttttgagctcctcagtgaatgtggccttggaaaaccccttcacctgggcagcaaaggaagagggagaaagacagagcctgaactggtaggaagtcctacctcaaaaacatcagtcagtcctcacatggatggccagggcattaaggagaactaattaagttaatttcacattctccatgacaaatgctgttgtcatcagtagggacctctcctctctttttccatcctcctacctgttctcactgtccctgacttacccacagtgaactttatgttttcaccttttatatccctatgcctggtcctctgctggcctgtgctgatcttttcataaatatttttgaaatgagaagacgcattttcttaagtaccatgaaagtcgacatcacatccatctttcagggtcctgctcccagactcttctgacttatctgttcactgtgctgggttggcagggaaaagtcatctgcagcagaaaaagtgacaaaatggagatacatagtgtgtcttggccaaaaatcagccaacagatgagagagatctaggattgtgagaagttctgccgttccccagcacctcacactatttgatgtctcaatgtttgtacatatcactatattttctagaagatgcactacatctagaaatagtgtttgctttgtttgtccccaagcaggaccccactctccactcagagccagttcacagttgccttcttccctggcccctgtggaaggagctgctcaggtgtttgctcccagagccctccgcattttccccttactgcggcctcctcacaatgaacaattgtcatgtttttcatttctcctgttcctgttattctagaaatccctcaatcaaaaaggatggttatgaatataagttacctgagacagagcaggggtgtggtccatggatgctgtgacctgacagggacccagcactcaggccaactccactcacatgattctgactgaaagactgaagtgtgcagcagggggaaatctgggtctttccaagctctgaacagtggtgcccacatatctgttatccctgggcaatggagcctgcactcactgaggaagataccacagctgtgtcttctctgggctgggtagagtctcctactcacaggtctgtggaaggtgcaggagctgcttcctcacttactcctcccgtgggacaaacgctgagtctcacccaccaacccaccatatctaaagaatcatgctcagacttcagctcttcctagggtggaacaaagattaccaggaggatacacaaatttgtgtggacagatcctcccttttcaggccactggagaagataaaagaggcctgagttaagcagcttcctctgtggggccacaggaggcggtgtccaccatggcctggacccctctgctcctcatgttcctctctcattgctcaggtgagaactggttttaggtgtctagggttagctccttagcttgcgtcagcctctctggctcagatccccaagacatgtatctctagttcctgccccagcccccatgagtgtctgtgcttgcaggttccctctcccagcctgtgctgactcagatgacctcactctctgcatctccgggagcatgagccagacttacctgcaccctgagcagtggcttcagagttggtaactttgcaatatagtggtcagctgaagccaggcagccgtcccaggtgtctcctgagatactactcagactcaaatatcactcagcaccctggggttcccatccacttctctggatccaatgatacattagccaatgcagggattctgtacattcctgggctgaagcctgagggtgaggctattactgttgtacgtgtcacagcagctccaagtcagcactccagacccactgggaggttacaaaaacctcttctctgatctcctggcctggtgtagtcactcctgctggtggctctaataaagtctatctcactgggtgacttatattttagatcttcaaccagcacctgattctttttttcagacaagtagatctgaaaatgtgactttattttcttcaattccactttcatattgattcatgctcataccttctcatttctttctggttttcacaggcagaaatcccttgctcagagacaaaaattctctaaattgagactttggaggagaccaaaagagagtggttcgggccatgcccggctcagagtctaggagtgactcagagatgcttctggtcccagagcttcaatctaggcattggatacaataccagcattcacaatggaattgtattctctatattagcaacaaaccatcacagattttgaaataaaaagaatataatttataataacatcaatataaaatatttaagggtaaatattaaaaaatggaaagtcttaaactgaaaactataaaacgttgagagtcattacaaaaaaaccttaaaataactgatattccttgtttgtagttggaaaactcaatgtgattataatttttataatgacaattctttccaaagttatctaaggaatcattgtaaggtcttcagtaaaaataggtttgcagggaatgaggagataaaaaaatctcaacaaagaaatgaaaactgtaacagaaaacatcaatgaaacaacagacctgggataatccttctcagctgccatgggatctaactgtatttaagaaaggggtgagtaggaaggcggctgccaaatccaggaacacagatgtcattttgagtgaccaaggtgagccaagggaggacagctttagtcagaagagcatagaccaggagcagaactcacatatctgaagctgatgggcagagtgtgggtgcaataggcctggcattgggtgctgctgagctgaaattatgctgtcacctgaggtgcgcccctggggtgacatggttctggttgttcttcaccccagggaaggacactgtgacctgttatctgttggaggatgaggactcagaaagctctttataagagagggcaccagtgtgatatgagggtccctgattgtctttccaaaggttggaaattgaacccgcatctttcatttttgtgtagagaacccaagatccttttctacataatcaagggttatttccaatagctgccttggcctgtctcagaaagagtgtgggtttgtcttacagcaatggtgcccactatttatgggaacgtcttgtataccctgatctatgctttcaggtctttgacatctcaggtttttggcctacctaatactagccatacgtctgggtactgtgatctacctcctactacacatataaatgcccatctcagcctcatctctccttgggatataaatgtgtgcaagggatttgaagcagctctgccttctttttgggtcctaaggatcagggttatgggtgtctccatccttccctgggtcttctcctcctcactgtcctgaaacatgacccagacacaggctcctgaggctcctgcaggccttcttccctgcttttgccaactgcaggtggaccctgccctgtgctcacaggtctttgtatctctccctgctggtcaattgccctgcaggggcttttcttatttctccattatgagaattcctttgtttttggaggaaataatttttatctaatttttgatttacttatcataatcctagaatttgtataaaaactcctgtttttgcataatgaaacagttgctatctcatgccattttattcaaagtcatgtgcttctgttcacttactggttagaactattgtttaatcattgacaaatatttatcgaacacccactctgcgccatgttctcctatgtcaggtgctgggtatacattgatgaatgaaacagactctatccttatggaacttgtgtctagtgagcttagaagtaaattttgtgagtgctaggatggagagtcaagctaaggactcttagttctgccagcatttaacatgttgttcttatacattttaagaataaattactccagaagaatctttttgttttgttttgttttgttttgttttggtgaagagtatccacatagacacacatagcaaagaccttatagaatgcatcagagataaacaaaataaaatgtaatgtttcccagagctggatgtagtttctggtttgatttattttaatgacacacagaagaaatcactttataatgaagtaaaattccacactacagaaacagagtaaaaatactttcttgaaaaaaatgccaaacctacctttaatcccaaggaaagagaattgcttgaatagatctgttagtatgaaacacataatagacaacctgctgtgtaaaattacttggaagtcatattttagaaggttttaaacattcttaatatactctgtttttgatattacgtcttatatttttctctgtggtggaaatttatttctaagaaataagaaaggatattagaatggcaaaaaatatttgtataaatgtgttaacattttaatggtaactatatatgaataaaataaaaacattgttaaaaatttattggaatgaataataaaattatcaagtttataattaataaaatcaagtatatttcttcttatgcaatttaaaaatagtgcagaatgtttattattctggtatcactaaaaatgacaaacttcattcatatctatagaaaaataattataaaattcagcaagtaatacaggagataatttgaacaaatattgaaacattttcttacttaaagacactaggtaaaaatttcagcaatgagtagagaggttatcaaggcgcattttattattgatgattgatatatgttttttctctcgagaaagtgcacaggtgggtatcagcagaggagacagtataggctccccagatgtcaaagcagggatgcgccaatacccatcagtcatcatcataaaagacagactgtgccttcctgtgtcaggctctgtgccaggagctgtgtgccccacgttcccttccagggtcctgcctgaagtctgtgctcactcagccagccccatcatctggaagtaacagtcccctcctcctgcactggaataagcagaagatttgggtggacagtgtggcctggccccatcagctcccaggagaagctctctgtctctctctcatcctgcatgccagttaatgacgataaaacccacctaaccaacccatctacaacactcagcttcatccctatctctctctcacactccatcaagggacacagtcatcccatgggttttttcccctggcatctctcactttcttcctcttccagatccctgggatcagctatcaccccacccgacaccccttctcctgcttggctgccttcaggctctttgttgagcctgacaccaaaggatgtctttctaaagtgtcagtttcatctattctgcccccagttcacaacctgaaacaacctccgatagtgaatcaagccaagcccctcactctaaagcacagagacatgccatgaattcctaaggggatgacagaatacatcattgatgagaagattgaacaagtgaagtgtgagtggcaagtcaggtgaggacatttgaatccaatctggcatttaaaatgtctcttcatttccaaagtcctatctctccctagtaatgttgtttgactgctagtcccagagcaggaccccacatcccagtgacagccaagtcacagtcgcctccttccctggcccctgtggaaagagctgctcagggctttgctcccagagccctctgcattcccaacttcctgcagcctcctttcattggatgggggtgatagtttgcacatgcctttctagtaatccaagaaaaacttactgaaaaagtctgtttgttcatgtcagtaatcaggggcatgaccagggcatggcccataaatgcctctggactgatactcaccaggctcccaggccaacaccacatacatgatttccactgagagaatgcagtctggacagagagcagcagggtacactgtaggtctgcccagtgggcatccacagctgtgccaacccctcccaccccacaaattcctcagggctgggcagtggaccctgccctcactgagcctgactcagcagctctgtcctccctgggtgtggtcccagcacccacttcctcccaggtctggcctgccagactcccccctccaccagaccctaggacttgaataaatacatagggtaaggtagaggcaggcaatgtgggggacacatttgggtccataactcctcctctgtgaggtcagtggaggggataagaggcctgaggcagcccactatggctgtggacctcaggaggactgtgttgaccatggcctgggcccctctcctgctgtttctctctcaattctcaggtaggcacaggcctcccatgtccagggcatgtccctcaggcttcaccagtcccctctggctaaaatcttacagcaactttatgctggtaggtggcccaactcccatgtgcatctgtgtctgcaggttccctctcccagcctgtgctgactcagccgccctccctctctgcacctccggatcagccagactctcctgcaccctgagcagtggcttcagtgctgatttctgctggatatactggtaccagcataaaccagggagcctccccagtatctcctgagccactaccaaaattcacttcatgaccagggctccggggtccccaggcacttctctggattaatggaaggccggtccaataaagggctcttgctcatatctgatctccagtctgaggatgaggcttactattactgtatgatcgagcacagcagagcttctcatgctgacacacacaggtggggaagtgggacaaaatctcagcctgctcagagtcttgttctctgatgaaatttagatcttaaaataacttatatcacttgtgtgggatgagtgagatatcccgagctcacaggaactgtcgatgaaaagagtcgagctctgtaaaatattgaagacatttattccaagccaaatatcagtgaccaatggcccacaacgcagccctcaggagatcctgagaacatgtaccccaggtggtcaggctgcaacttggttttatacattttaaggagacatgagacatcaatcaacacatgcgagatgtacgttggttgagtccaggaaggcagcacaactcaaagtagtggggctccaaagatcgtctttttgataattggttaaaagagttaaattattgtctaaagacttagaaccaaaggaatgcctgggttaaattaaggcattgtagtgaccaaggttttgttgctcagaggaagcctccaggtagcaggctgcagagaaaatagattgtaaatctttcttatcagatgtaaaaagtctgttctctcagaaattccaaaaatgaggaggcatatctggctccccgttcccatgatgacctgaactctctttcagattaactttggaatgcccttggccaaaaggaggggtctgttcagatggatgggagtcttagaattttatttttggtttacaatcctgtaacacgtcctgtaatttgctgcccagaggtcattaatggcctggaagaaataatgtgccagctgcagtgttgtccacagaaagacttactcattctgctgccctgagtagtgatatcagaaagatccatctgccaacagtcagaatacccttccaggagggttgcacagtaccaggggtgctggaagacctgggatctgaggcaagcagggggcactgttggatggatcccaagatgacaggattaccaggccacacaaggattaaacaagagacagtaacagtccactggctcttacacacttggataagcagtgacctccctgaagaatgactttcctgcacctgggctgaaggacccacatgagcactgggttttggataaaatagagcaatttcatttatgaacatagatgtgaaaattcctcagcatattcacaagtagaacccatgctggacctctgacctctaggatttaggctgagaacaggacatttgtgaggtcggtggggaataagcatgaactttggagggacagcaggtatgaggggtgctgagccgtatgttagatgccccaatcagggaaagagcctcgaggcttccagtgcagcttccctgataccctgtgggagagaaagatagatactggatatgctgcaatagagctcactaatgctctagtaaagagcaggcagcttgcattagcacagtccttcaggagagaaaacgcagccccaggaaagctgtcagaggccaagatgactcattagtcacattgaattcataatgcatttatgatgaaatatatgataaatgtcttatccttttgttcttttttattttttattatcgtgggtacataataggtgtatatatttatggggttatgagatgttttgatacaggcatgcaatgtgaaataattatatcatgaagaatggggtatccatcctctcaagcatttatcatttgtgttacaaatgatccaattacactctttacataattcaaaaaagtacaattaaattattatgaccataggtatcctgttgtgctatgaaatagtaggtactattcattctttctaactactttttgtacccattaaccatccccacatcacctcctactccctgctaccttcccagcctctggtaaccattattctactttctatgtacatgagtttcaaatgttttgatttttagattccataaaaaagtgagaatatgtgatgtttgcctttctgggcctggcttattacacttaatataatgatctccagttccatccctgttgttgcaaatgacagactcttattctattttatggctgaatagtactccatcgtgtgtatttaccacattttttatgcattcatctgttgatggacacttagattgcttccaaatcttagctaaacagtgctgcagcaaacataggagtgcagctatttctctgatatactgattttctttattttggatatgtatccagcagtgaaattgctggatcatatggtagccctatttttaggttttttgaggaacctccaatcgttctccatagtggctgtactaaatccaagaacattcaaaatcatatttatatcagtgctaaaaagtgtgacttgacttcaaacaatagccagtagttggtaggaatacaagtataagtttgctaaaaatatgatttgtcatttatatgaatatttctgttcccagaacaatctcatgtagactggcttctggaatctctcctacctcctactgagctgactctcctggagcctggccgtaacggtgcagggctggaagctatatactacaagcacatgctgtatggcatccagcactaacctgggcagatgacggcgaaacaatgtgtgatatttccatttgatttattttccttctttctctatagaaagtgttattataaaactgttatgttgaaggaacacaaaatttgaaggaaaggaatcaaacataaatgttaaatgtttatgtgtgtttatactgttgatctatgatatctcttgtagttactgttcaacatttctattttatatgcttttgtaaaataaacaacatattttatacaaaaactctcatgtgtgctagttgaaagtaatgccacctaaatgcaataacagaatttgaggagactaaaatgtgttgatttgagagacagtaagagtaatttagaacaagtccccatctggctctgaaatctaatcctttgctggtatccctacacctgaaaacctgcaggctttgcacctctgcagacagatgacattgggttaaattcatgggtctccactgagggtcacaataggctggtgtggcacagtgcattctgggagatacagaactgagggacagtaggctgggcgcggtggctcacacctgtaatcccagcactttggcaggccgaggcgggcagaacacgaggtcaggagatcgagaccatcctggctaacacggtgagaccctgtctctactaaaaatacaaaaaattagcctgacgtggttggggggcacctgtagtcccagctacttgggaggctgaggcaggagaatagcatgaacctgggaggaagaggttgcagtgagccgagattgtgccactgcacttcagcctgggcgacagagcaagactctgtctcaaaaaaacaaaaacagacaaacaaacaaagaactgagggacagtatatccccagtggacaccgatccataatcagccccagtcactgcacagactgggtgtatggtgtcctcagtgcctgctgcttccgtgtaaatgaacagcaggagatcctagggtattagtgaattatatattcatttccaacgtcacactcaagatgaagtctctacagtatttgaaattgaacttggacagcttcaactatttttgtttcaaaaaatattatatatacaaaaataccctatttctgaaggtaattggagtttattttacttccacaataatactaaacataaatggttagcgtattataaagtggtgtgtctaggcatggacagcagaaggcacttggagcctgttcctgaggggtctgggggtgttcggagctgagaccagccacttcccctgtctggtgctctctgttcagggctcacagctgtgatctcctcacccctgaacggctcacagcactactcatacttatccctatggcgccctcaggcagaagagtctgatccagggctcagggtgggatcagaaaagttcccatttgcatgaggagatcctccctgcctcagagtataaagagagaaaaggagagagttgggaaaagctttacttcaactgtggggcaaaaaggcaggactcaggacaatctcaagaatggcctggtcccatttcctgctcaccccctttattcactgcacaggtgactggacatggggccacggaaggggccctggggagcccatggagagctgctttctcctcttatttatagacccagaatcaccatgtctgtgtctttcccactttcagggccttgggtcccatctgcgctgattcagtcaccctcagtccctggggctctgggccagagggtcaccatctcctgcactggaagcagctccactttggttattggtgtgatatacactggttccagcagctccaaggaatgacccccaaactcctcatctataaaaacaattggtgacacctgtgggtccctgacaattctctggcttcaagtctggcaactccattttcgtgaccatcactgtgctacagcctgaagatgaggctgattatcactgccaattctacaaaaacagcctgagtgctttcacagtgctccgggttgaagtaagtcagaccaaaacacacagtgtgcccagccatgaagctctcccatgcaccccctactctgcagctaagtcaatgtgttctctcacttgtttgtcctaaaactggggcctgagaacttcttcagggtaatttttctagggaatgtgtcctcaccctctcaatatctgccccaaattcactctttggcaacaataccatgtgctcttttctcagaggtagcagctggtactgaatgccagaggccagctgccctgtggtggagtacagatgggtgaatcagtcggctggggcttccacaacaacacaccacagactggagtcttcaccaacagatatgtattgtcttactgttctggagtctgaaaggaccagatgaaggtgccaccccgtttggttttctctttgccctctttcctttgcttccagatggctcttttctcactgtgtcctcacatggccacccccaggtctgcatgtggtttttgtacacatttcttatgaagtctttagtccttttggattagagactcattcctatgacttcattgaatcttaataatcttagtgtccagatctcccaatacagacaaattggtaacttagttataacataaaaaatcagggggccaggctcggtggctcacttctgttaatcccagcactttgggaggctgaggtgggtggatcacgaggtcaggagattgagaccatcctggctaacacggtgaaactccatctttactaaaaatacaaaaaattagctgagcatggtggtacatgcctgtagtcccagctactcaggaggctgaggcaggagaatcactggaaccaggaggtagaggctgcagtgagccaagatcacccactgcactccagcctgtgtgacagagcaagactccatctcaaaaaaaaaaaaaaaaattcggggtggatgcaatataatttgtaacaaaggatcaggggtccagggacccagagtccatctgtgtctgacccaggagaggtgatgctgcagaggccacctggtcactccattcctctgagctcctactatgtgcagattctggatgtgttcttggtgctcagggtacagcgtggataagacaggatggtccctgtcctccaggaactgatgctatttaggggaaaacagaacacatcagtaaatgtatcaataagaatatgacatgttttaggaaaatgaagagaggtgtgttttggtgaggtggggtgagcagacttagaggagttgatgacaaagatgcagcgactgattaaggttgtaaaattcacctgctgcaacataaagtgaactaagaggaagtgagggtccaggcagggccatatgaggctctggttttgacacaaacattaggctgtggagtcctggacatgggcggaacacgcaaacggtgaaaggtcatgtctgcatggttcagaagtgggaggtgctgaggaatggagtgtggggagacagggaccacagctgggatctcaggacctgtgaggggtataggtgagctgcagctaagtgagaaaacattaaggaccctgtgtagttgacacaagattattgacatcttaagtcttcaataaatacaatcagcgctgacaaatgtggccgtgcctcagaagagctagaaatgtttatgtctaggtaactctcatgttctgtagaacttcacttgtatttttttggttttaaaggattattataagagcagacgtttatgaatatactccattcttttatcctcaatattgcccatctcttaaaatcctttggctttacacacacctacaacaaactgatcttcaaaaattgataaaaataaacgatgtgtaaaggataccctattcaataaatgatgctgagaaaactggcctacaatgcagaaaagtaaaactggacccctacctcttaccatataaaaaattaattccagatgaatgaagacttaaatgtaagacctccaactattaaaatcttagaagaaaagttggaaaatactcttgtggacattggtgtgggcaaataatgtatgtctaatcatcaaaagaaattgcaacaaaaaacttgacaatcaggaccaaataaaactaaggagctcctgcatggcaaaagaaactctcatcagagtaaacagacagcctacgcaatgggaaaaatatttgcaaactatgcatctaacaaaggactaatatccagaatctataagaaagctaagtcaacaaaaaaatttaactccattaaaaagtggacaaaggacatggtcacttctcaaaagaagacaaaaaagcagccagcaaacatgaaaacatgcagaacttcacttatcagagaggtgcaaatcaaaaccacatgggatatcatctcataccagtgagaatgggtattattaaaaagtctaaaaataacagatgctggcaagaatacagaaaaaaaggaatgcttatacattgttggtggggatgtaaattagtacagcttctgtggaaagcagtttggagatttctcaaaaaaaaaaaaaaaaaaaaaaaactaccactggacccaggaatctaggtgtgtacacagaagaatataaataattctaccaaaaagatatctgaactcattcgtttgttgcagcagtattcacaatagcaataacatggaatcaactcaagtgctcattagtagtggatcgagtaaaaataaaatgtgtgatacgcattcaccatggaatactatgcagccattgtgaacaacaaaaccatgttctttgcaaaatatggatgtagctgaaagctactttgcttccagatggctctcttctcactgtgtcctcacgtggtcactctcaggtctgtgtgttgtttttgtacagattgcttatgaagtcattagtcctcttggattagagactcattcttatgacctcattgtatcttaattatcttagtgtccagatctcccaatacagataaattgttaattcagttataacgtgaaaattcagggtgaacacaatataatttgtaacaaaggatcagggatctctttggcttctcgatggatcacctgccaaggggcaagggtgtaatttttacaatgataggcgcatagctcttaacacaagacagaattaccctgttgaatgcttcattcaaatgatatgttagggaggaggccagttggatgataaagctttgggaatgaacatttaacagcacaggatctaaaatgcagaagaaaagaacctctgatgcaaactttctgagtggagataaactgtctgatatcctgcagattaataaaaccagaaacttcatctgccccctctaatagaaatctacacattaacacaatttcactatatgaagtttccagaagatgatgtggagcttgcaggtgagcttcattttacactttccgcctattcatttctgtgggaggacttactttccctctttcaattttctcatgtgctgttcatgtcacaccctctaattcaaggctccagcccacctttcctgccaacaccaacactctctgtagatgaaaacccaccagtcagcagcctccttggcctgagagaggtcatcttcctgggtttctaagactctggtcctgccgagattctccttcctcaatcctaatcccgtggtctctggcagccccttcacatggacctcatcgctcgtctctgtgttcctccagctatatccacgtcagaaactgctcttcatctgcactagaaataaagaattatcctctcaactcttaaatgtttgctctgattctctcctcttctttgagctcaggcacaccaccccctctcagattcctgagtgtggcagtgtcccctctccagtctccctaccacctccaatggtgaaggcgaagaaaggatgtccctgcatgtatcacatcctcatccttcccttcagggtcagctccctgggtagggaaaacactgttcccttgaggctcacatacccactgtcaaaaagcacccagcacatggtaggcactcaataaacctttaccaaatgcagacctgcctctcaccacactggacacattgtagtgagctcaggatggggctaaactgggagtattagctgtaaacttgctcctctctctgtccccagcctgagagctgagggggcacccacgagggagagcacctaggggcagggaggggtcacaggcagcctcatcctctgtgtgagacactgctcagactgggggatccctcttcattcagatgggaagaaaagggaaacaaaattcggtaggaacttctatgcatccacacagaggaggcaatgacaagaaaacacaggatgcaagcacagtggtaataatgtatttctacctaatattgaataaaactcaatattgcctgtattctgtaaacaataactatttacaaaactgactgtaaattatgattttaaaaaccacagcttatgaagaagagaaacctcaaacaatgacacccctgaattgcaaatctaagacatggcacacatttattttcagttccatatgtggcctggatttatttacaagacaatattatgatattatatgtcactattccattttagatggtgtatttaaaatctcacagtactgcaactacctagtaatctactcatcagtataaacatcaatgtgacaatcctgctatccttctctacccctgcataaccccagcaaaaattcattatgaattcacagaatgtaatatcagaactgttgtagccacatacacagtttgtttcattttatgttttgataaagtaatcttttttgtttaagcttattgttttttaaaaaatatattacatactagatgtcattacaaatcagagattaataatttctcttatgcttatactactcccacagcactcattactgaatgtaaaccatatttatattttctttctttttttttttttgagacagggactcactctatcacccaggctggagtgcagtcgcacaatctcggctcattgtaacctccacctcccaagtttaattgattctcctgcctcagcattctgagtagctggcattacaggcacccgccaccatgcccagctaatttttgtatttttagtagcgatggggtttcaccatgttggccaggctggtctcgaactcctgacctcaagtgatctgcctgcctcagcctcccaaagtgctgagattacaggcttgagccacctgcctggctccatatttatattttctaaacatcctacttggagtggctgatcctaccagctaccatgtttccacctcacctgggatcaaacactgacaattggtaattttatctcttgcagtcttcaaatattgagcaaatttgccatttttgctattcaataaaaatgctggaaagttatttgccatgccactgactctgttcagtgcttggaggacagactcctaggagtgagaagttgaccacagcatctgaatagctattaccccaagtctgtggaaattagagaacaaaattttaccagaaatgccccccagagcttctccccataacctcaccacccttagagaagagagctcctgttctcctcagcgctgcagggtccacagaggaggaagagctctggccagcagggaggagccacagaagaaaggacctggtgtctcccgtgaccagggtagtgagtcatgggaaccagtcactgctctggacttgacctgacctaagaggacttggtatagagtcaccacttcagtcctcaccaaggaacatccaaaaagccctggacagattcacccttaaggagaccagtaaagcatgaactgccctgagttaatgagaaggtcacaaaaagggtctgtctggcctggtgctgagcctgggggcagtgatcagagcagggggaatgcacagctggctctggggacatctggtcatcatgtcacaggagagtgtgtctggatgtggacacctggggacatgaagggctcattaccaagtgatctaggggagatcagagctgcgatcagctaactgcctgcatggtgccctctgctcagtgatcacagtggtgagctcctgatgccccggaacacacagtttcacccttgcctgtatccctgatatccacgagaggggcctgacccaaggccagcgtgtcatcagaaggctggggggctctaatttgcatggatggaccctcattctcagagaatgaagaggggaagggagagatttggggaagctctgtctcagctgtgggcacagaaggaaggcaggactcaggacaatctccagcatggtctggtttcctctcctcctcactctccttgcacactgcacaggtgactagatataaggccatggctaaagccctaggaagcccatgggccctgctttctccttttgtctctcaacccagaatcaccatgactgtttctctcccacttccaggatcctgggctcagtctgtgctgactcagccaccctcagtgtcttgggccacaaggcagaggctcactgtctcctgcactggaagcagctccaacactgggactggctataacgtaaactgttggcagtagctcccaagaactgaccccaaactcctcaggcatggtgataagaattgggcctcctgggtatctgaccaattctctggttccaagtctggcagcttggcctccctgggcaccactgggctctgggctgaggacaagactgattatcactgccagtcccgtgacatctgctgagtgcttgtacagtgctccaggcttgcaggggagtgagacaagaacccccttcctcctttcccaggagggtgagtgcccagcagctactgcacaggcctggcctgtggcttctgcagttgctgtttccccagtgggcctgggagcatccagggccccacctgggagtagatgcttctcctcccctccgtcctcagagtcacccacagcagtccctttctaggaaaagggcctccagaaaacagaatgtcctgtaccctgcaacttgggacacagggtctctgctctaaagtccaggggctggagtgacaaatccagcagtgaaatctcagatctacatctgatggggaacctgcatctccatcatccttttgctatttccaggagttttcaaagcagtgtcttcctctcactggtcctcagtgtgttttcctgttctttttgtttcagcctatttttttttttttttttgagatggagtctcgctctgtcgcccaggctggagcgcagtggcgcgatcttggctcactgcaaactccgcctcccgggttcacgccattctcctgcctcagcctcccgagtagctgggactacaggcgcccgccaccatgcccggctaattttttgtatttttagtagggatggggtttcaccattcacaggattgtctcgatctcctgaccttaagtgatccgcccacctcggcctcccaaagtgctgggattacaggcgtgagccaccatgccgggtctgtttcagcctattttttatgtgtctttttattgaggaataattaacaaaataaacccctgatatttaaagtgcccaattttgtgtgttttaagatatttatacacccttggataatcaccacaatgaatcagtgattccatcagaagaaatcggtgactggttctggcagaatccagggaaccctatctaatatctcgtgaacttctacttggactcaagtaagaaacagggctctgaggctcccagccacatcttgggatctaaagatgcgtcggcctgtgcaaggattttgcacgttgctgtgctgcagcctgagaatgggtctgtctcggggtctgcacaggggcagtggatttcacagtggctctgaggcttacacagggctccaggcccatgggaaagtgagacacaaatcttccctctgctctctaggcctggtgcagtgatcctggctggaggctctgataaatctagctcagaatgtaacttctgttgtgaacatctgattttccttggacaaatagttctgacaatatcttatttcagttcgactagtatatcgatccattgctcatacttctcattccattcttgctttcgcaatcggtggaccctgtcctgtgcccacagttctctgcatctctccctgctagtccagcctcctgcaaaggttcagctcccagaagagactcctacatccactgccctggaagaagcaacactatgagtagaatggcaagattttgtcacatcagcactggggataactcatcactactctgggcccattgaagcaatcacatactctctgaacctcagttttcatttttggcagcatgtaaccctacctcagcagctcttgctttcaacatggggatgagctgaagaagaggcttgtaaatgacaagtatcagtcactgttcaccgtgcaggggtgtctgtgtccttctgtgtcaggctttgtgccagcagggctgtgccccgcaaactcttccaaggtcctccatgcagtctgtgttccctcatctggccacattgtctggaagttaaggtcacctcctcatgcactggaacaagcagcagagtcgagtggacagcgtggcctggcaccgccagctcctacgggagccccagatggtaatgcctgctggtctccagcttgcagggttctgattttgggctcttgctctaggtctggccacttgggcttctgcaatactctgggatcctgtatgaggatgagggtgatgatcagtgttcaggatgtggaaagagccccaggttaacccaggacacctgtctcatggggacatgaggcacaagcctcccatctgatcccacagcctggcctatagactcactttaattttgtgtgactgtcacctgactcaggacattcctgcagtcattttttcctccaggactgatggaatgaggccattccctgggtctgtcgcctcatatgcagtcgacctatatactgggctttcaggataaaacattcccagcctgggcattgcaatacagacaggcaggtagctcagacagaaaatactcttgttgattccagatttctgggcacatggacttggtgtgtgtttgtgtccatgactaaggtcaggtttggggttgggagtgagagtggtcaccacatggtccaggaagaatgtgttgtcaaagataaaattcgtacaccttcctgcccttccctgtacctgaggcagcttcctgaagcctgcaggtttctgagattctccataaatggagaggaaacatcccatagaatggatgggttttttttgtcccagacaaaaagacaagacaggacgagggtacagatgtcagcaagggttaaacagcaagtatgcacttgatcatgccaaagaatactgaaatagctttgagggtaattcagtgtccttgagaattaaaaacaaattggagattgagggcttcaaacccccattaggtccttgtgcaaacagatgctgaattccaacccacattaagaaagaggctaaaaagatgagacaaaatctctgaaagacaggtggaggggatttctgcagtttcttggtgcttaagagacagggacctgccaggcactcacctgagaaatcctgcagggtcacagcacagggaagggaatgtgtcgggtacataagatgactttgatgttgaaaacaccacctctaccactgataatggttttcatcattcatacttaggtgcatgtacaacctctagcaaccataattaccacaaaggacaggcattgtgtaaacttttatgaggttctgtgttataaaataattacacaaaatgtataaataatgtgggcactaataaggtgaggttatatgttgcaatatctggggttcctattgaatttatagactgtaaaactaaataggtgctaatgtaaaatgatacagttagaaatacttgattcatgaaaaataaaaagtgagcgaaaagaaataaagcaaaaagcccaaataaaataaagagaaaggtaaactcacacacaatatcagcaattatattcaatgtaaatgtgttgatgaaccagataaaaataatttccttaaaataaagttacttgtgtgttatattttaaaggatgctaaaaatacactatgcaaacatttacctgcagaaagctcttgtggttatctcggtatcagaccagataatttcaatgaaaattatttacatcaggaaatgtgggacattttatgtatataaaatgaaatatttgacaagaacacataacaattataaaatacacatcagtccatgcatggtggctcacgcctgtaatcccagccctttgggaggccaaggtgggtggattgcttgagctcaggagttctagaccagcctgggcagcatggcaaaatttcatctctaaaaagtacagaaaaaaaaattagccaggcacggtggcatatgtgtctgtagtcccagatacttgggagcctgaggtaggaggatcccttgagcctgagaggtggaggttgcagtgagccaagatagcgccactgcactcctgccagggtgacagagtgagatcccatctcaaacaacaacaaacaaacaaacgaacaaaacaaaccaaaaaagcacacacaaataaacaaaccaaaaaacatgtccctaataatataatctatataaaatataaattagcaggactaaggaagagaaaagaatcaattcccaattatagttataaataatagcacacacttctattaactgagtgaatcagcagaaaaaaaattgcacataacaatatgtgaacaacctgaaaaaccaaattcacccactgacgccaggagcccaaacctgaggagtagttggctaatgaatatgtattactgaaacgattgaataagtgctagaagaaataaatgaggcattcattatttttacccgatttgatgcttctcctctctgtcctgtgagcagggggcactcccatgtctattcctagtcccattcttatcccctcgtctctctccccaagactgagctgcattctgcagggtggctcccgtccccctggagtaaatgactgacgtgaggagccctgccttccagtgctgctgttttcatcgtgctctggtttgaatgtctcccttccaaaaggatttatacttaattgccagtgtgatagtactaagaggtaggccttcaaaaggtgatatagtcttgaacacggagacctcacggttgggatcaggtctcttatataaaggctggaggtagcggtgtgctctgtctctcttcttgccatgtgaggacacagaaaaaaggcacttatcagatgacagtgccttgatcctgaacttcccagcctcaaaaactgtgagaaggccaggtgcggtggctcatgcctgtaatccaagcactttgggaggccaaagcaggtgaatcccttgagtccaggagttcgagaccagcctgagcaacatggtaaaaccccatttctataaaaaatacaaaaattagccagatgcagtgacaggcacttgtagtcctacctaatcaggaggctgaggtgggaggatcacctgagcctgggaggtcgaggctgcagtgagttgtgattgtgccactgtactccagcctggatgacagagcgggagactgtctcaaaaaattaaaaaataaataaataaaaaataaaacagtgggcgagataaagaaaatgtgttacttatataccacggaacactatgcagccataaaagaaagttatgttcttggcagcaacgtggatggagctggaggccattatcataagtgaactaagccccgaacagaaaaccaaatgctgcatgatctcacttataagtgggagctaaactatgaatatacccgaacatacggaaaggaacaacagacactgggaatgactaccagaccaaaaaaaaaaaaaaaaaaaaagaggatccaccctgtggatcctctgcccactgcctgggtcatgaggttgttgggaccccaagcctccgtgtcatgcaatcaacagatgtaactaacctgcatgtgtaccctttaaactagaatagtaagagtaaagagcattgaaagaaaaagtcaagatcagaagcgaagaaaataataaatgaaaaaacacaatctatagttatccaaacaatccatgactgtcacaaacacagaacaaggacccagtggacagaatgaggcagccaaatactcaacccaacatgatacatagggaacacatttttcaaaacaccaaaaagacacaatgggaaagggagagtctggttcaagaagtgattttgagaaaactgaatatgcacatgcaaaacactgaaataagacctttgcattgcacgatacacaaaatcaacacaaaataaattaaagacctaaactcaatcttgaaactgcaaaggtcttataagaaaacataggttgggtgtatattttaggaagcctgtatctatgcacacaggctgcaaaaggtgaaaaataatcataacactaaagggaaaattaggggaactacatgcacagacaatgcaatggcttggctatatatgtgtgtgtgtatgtgtgtgtgttttgtagggtggaggtttggatacaaaaattacagctaacatgcaaatataaacaaagacactagtgacactttagaacttctacagggggaaagaaacaatgaaataaacaaacaaacaaaatgcatcctaaagactaggagagaattatggaaagtcctacctctgaaagagattgttatctaacacctacaataaactcactctactaaatgaaaaacaacaaaaacaacaacaacaaatacccaagctaagaggatctgaatagacatgtgtgtaaagaagacaggaaattgactcacaggttaacagtttctcaatatcactaatcctcacaaaaaagtgaatcaaaaccatactcaggtaccatataattccagttaaaatgaatattgcaaaagataaaaataaaaattgttggaggtgatggctggtgtagaattgcaggaaggaaaactgttgtacgctctttgtgggaatgtaaattagtatacacactatgcaaaactgttggaggttccttaaaaaagtaaaaggtcaaagtacaaccaccactccaggttaacaatcccaccactgggtacacatttagaggaaacaaaatccctgcattgaagaggtatctgccttcccatgtgtcctgaagcactagtcacaatagtcaagatatggaatcaacctaactgtccatccacagatgaagagataaaggaactggatatatacatgatggaaagcatttcagccataacagtttgggaaatcattgatctgcagccatgtggagaaacctggaagacaattaggggaaatgaaatgagcctgttagagagagacccatactgcatgacattaggcaaatggaatccaaaaaacactgtcttctagaagcagaactttcaataggggttactagaagctggagagaggagggggcctgggcagggattggtaatgggtacagagtaacactcagaggagaggaatccattctgatgttctattccacagcagggtgaccagggtcaacaatgtctaggggaatttttcaaaaacagctggaaaggatggttctgaatgttctctccacagggaaataataagaagccagacaccatgatttgatcatgacactacgtatacatatatcaaaatgtcccttgcaccctctggttatatacatacactctatagtaatgaaactgccatcaaatgttggtagtattcattctaactggagtgacatagaatctgagtgtggttttcaatcatgttttggtgtgaatcggccatgttgataatcttatcttttacctgtgcatcaacctcatgtcttcaggtcctctgcccacttttacacatcaaattcaaaacaaattaacaataacatggcaaatataactaatcacacacacacagaaaatgaaaaccaccactcagattccatctcactctagatggaatggatactacaaaaaaaaagttgaaaaatattaaaagacaaaaaaacgatggtgtggatttccagagggggaacttgtctccgcagttcgtaggaacataaactagtacacacactaaagaaaccacttggaggtccctccaaaccttaaaaccacaactaccatttcatccagcaatctactactagtcgtatatacagagtacatgaaatcaagccatggaagagattatctgcgttcccaggtggaatccagcactatgcagaatggccaagatgagaaatcagccgacctgtccatctgcagatgaagggataaggaaactgtcccatgcgtagacactggaatactcttcagccagaaaaatacaatgaattcccatcacgggagccacacggttgcacctggaggacatgatggtaaatgaaatgagccaggcagagacagacaaactttgcatcctctcactcatgcagaagctgagaaactttatctcaaagacctagaaagcataatcatggttaccagaggttggggggaagaaggggaaggggcaaggattggaaaggggtagaaagttccacacagatgagaggaaggaaattctgtttttctattccacagcagggtgactagggttaatagcatcattacatcttcaaaacagcttgaaaggaggatactgaagcttctcgccacaaaagaataaacagtggtacgaaataacagaaaaaataaataccctgatttcgtcattccacaatgtatgcaaagaccaaaatgtcgcactctaccctctcattgcattcctttactattcagcaaatttgtttaaagaaatataaatacatgatgctagaattcacatgggaccatgaatcaccctgaatttcttccaaagcaatcctgagacattcagactacatcagatgcatctcacccaccgatttcaaatttcatggaaaaactgggtacctgcttccacacagagcagtggaacacaagagagggcccagaagtaaactcacacaccaaaaaccatctgatccttgacagaatccacaacaataagcaagggggaaaggatgccctattcaaacaatggtgctgggataagtggttagccatatgcggaagagtaacactgggccccgacctctaaccagacacaaaaagaaactccagatgaatgaaagatttaaatggaagacctcaaactattaaaatcctgcaagaaaacatacaaaatacctttctccacacaggttttggcaaagaatctatttggctatgtccccaaaggaaatgacaacaaaaatggacaagccatgcttaatactctaaagagccaccacacagcaaaataaattagcaacagagtaagagacagcatacagagtgggagaacatgttcccaaactgcatctgatcaaggtctaatatccagaatcttcaaggatcttatgccaatcattcaacaaaaaacaacaaaaaaatcccattagtgtatgggcaagggatgtgaacacacacttctcataggacaatgtgcaagtgaccaacaaagagggaaacatgctcaaactcactcatcaacagagaaatgccaatcaagagcaggtcgagataccatcccacaccactcagagcggcgatgactatgcagacaaagaaagaaagaaagatactggcgaggcagctgaggagaggaaaggctgatatggtcttggtgggggaagcaagctagtacagacactgtggaaagaagtttggagatttctcaaagaacttagaactaccatccaaccccacaatccctctcctgaagatctacccaaggaaaatatatccttctatccaaaagacacaggcacttgtatgctcacggccgtgttattcacaatggtaaagaaacggaatcaacctaggcatccatcaacagtggataagataaagaaaatatggtatgtatacaccacaaaacactacacagcccccaaaaatcacatttttggcagcaacatggatggagctgcaggtcattatcctaagtgaactcaaggccagaacagaaatccaaatgccacacattctcacttataagtgggaactaaactatgaatgcacctgaacgtaaagaagggaatgattacattaggaataactaccagaccaaaaagaaaatgcaaatgggagggagggggcgttgcgtcctgaagacccaccttgtgcgtcctctgctcactgcccgggtcatggagttgttgggagcccaagcctcagtattatgcaaccaacagatataattaacctgtgtgtgtactctttcatctataataaaagtagaaactattacacacacacacacacacacacacacacacacgaagaagcttaagagctacataaacaaaaaaataagtaaaatctatagttatccaaacaatccctcactggcaaacacacagaaacactaacctatggacaaaatgagaaagccaaaaatgcagcccaaaattacatatggtgaatgcatttttcaagagaacaccaaatatcacaacagtgaagagagaagtctgctaattgtctttgagtaaaatgaatttctacctgcaaaacactgaaatggatcctcatgttacataagacaaaaaaatcaatgcaaaatacagtaaagatctccacccaaaactgaaaacacagggtgttttcacaccctagaagaaaacacagggtgagcgtttacttcagtgaaactttaatctatgtacacagattgccaaaaggaaagaaaacaaaagggaaaagtaggaggaagaaacccacagacaatgcgatcttttttcctttttttttgtgacgggacaccaaagtcaccacatgcacatgcaaatagaaacacgcaggactatggaaagctttagagatgttccacaggaatgaaaccaatgaaccgaaagagaaggtgtcctacagatttggagacagatctgaaaaactgtatctctgaaagcggttgttatctaacatgtccaagaaactaacaccactgtgtttggaagcaacaacaacaacaaaaaagacaaaacaaaacaaaaacacaacaacacatatgctgaagcaaaactgggcaaaggcccttaatagacatttctgaaaagatgacatgaattgactaatgagtcaaaaagaagttgctcaactttatcatttctcccgcaaaggtaagtccaaaccacagattctctgggattctggagaatgtgaattctgactcagtaggtctggagtgagcctgagattctgcgtttctaaaaggttcatttccccacaaatccacattatgtgtattaatattaccaagtaaataagaaaggtcaaaaataaaatggcaagccattagtagataaccttagtcttcctcctcatcctcctcctccactgcatgggttaggatggtccccagcatcctgatcccccaggtcactgacatcagctcccaaactcatgccaggaatgtccttccctcttcttccttcaggccataatgggtatctatttttccagcatctttctcccaatctgtgctgatttagccaccctctgtatctgcctccctgggacaaagggtcaaactcaccagcactctgagcaagagctacagcagctgccacatagactatccccagcagagctcagtgatggacaccaggttcacaatgccagtgggcagtggtgctgtttactgcatccagtggggatggagtggttgtccaggcacagacagatggacaatcacacagcaggaacaaatgtacattctgaaatttaacaaagacagaataagggactcttggggaatagaggtctcaattgcagacatagtgagtgcctcaaaaattagagaactggggccatctctgtcatggcccggattcctctctccttcatcctcctcagtcatcaaagagattccattagggggcaatcaaaggatgctggggcctgctactagctcccaaaaaacaccacaagcatttcagcagggagaaaagaaaatgctcacaaggatggggttagatttagttataaaccagattgtgtggcaggagggaggacatatcccccatcctttggccactccaaaattgggagagctaatctggggaaaggcaccaacacctattcattagtgtctcggtcctgtgtgatcatgggtctgtgtgagttctcagcagctgcctctctcaaggtctccccacaggacagcagggtgaaacctggggcaggaagagaggggaagctgatttgcataaagaactttttttatcctattgggtctggggaggcatgaaaaggccctgaggaaaacaaaccccagctgggaagcctgagaacacttagccttcatgagtgtccccaccatggcctggatgatgcttctcctcggactccttgcttatggatcaggtcaggggaagggactctatccctgggggaccacagaaaacagggtccaggttactctcatcctcatgatcataactgtgtctctcctgttcgttttaggagtggattctcagactgtggtgacccaggagccatcgttctcagtgtcccctggagggacagtcacactcacttgtggcttgagctctggctcagtctctactagttactaccccagctggtaccagcagaccccaggccaggctccacgcacgctcatctacagcacaaacactcgctcttctggggtccctgatcgcttctctggctccatccttgggaacaaagctgccctcaccatcacgggggcccaggcagatgatgaatctgattattactgtgtgctgtatatgggtagtggcatttccacagtgatttaaacctatgaggaagtgcaactaaaacctctttatatactgagaacagttcagcccttacagacaggagggaaagtgagagggtggaaatggtcaacacggtgagtgaggagtctcctcgccccagtctctgacgcaggggttcactgccaggtgcctcacccagtctctccccgggtgtgtccaccttcccagtgtggcttttccatggctgtgcttcgtctccactgagaataatgtggagggagaattatctacaaaatatataagctcacagtgagtcacagacaccccagtgctccaggaagacgcttcttattcaaagagaattaacaggcatatgctcactcattaatttgaccatggaggctgactgaatattttatttatcactgaagtgggagcattttcaaggggcttgttaaaaatgtaattctctaacctaaacctactaagtcagaaacttgtgttggtgacagatagcctgtatttaacaagctgtacatgagatttttattagcgttaatgtttgggaagaacctacttttattatcataaaattattcataaggatctccatttataatgatgtcaggttaatattccataatcctactctcctaaattcccattcaaagcccccaaatactcagaaacagattttaaatctcaagccatagcaaaaattataacttgatttatgcagacagagtagggaggaatttctaaaaccgtaagttcctaggtgccaggtgtgctgactcatgcttataatcacaatactttgggaggttgagacaagaggactgcttcaagccaggagattgagaccagtgtcttccacatagcgagagtctatcaccacgaaagaaaaaaaaaagatataagtcccttcaggaatttccaaaaacttgtttccttagggtatatttagtggtccatatgaacatctgttactgaaaaccatcccgtagaggactggcttccagaatcccttctccctcccactgagctcacctacctgtggctctggctctcagggtctttataggacacagggctcagcctcttatcaccgattgttccacaggatcatggttccactgagatcctctcagcatagatacgtacctgtcctgaacagtgtcttttaacataatgttggcaagatgggaaggactaaggggtgacggagccttggagccaccagaagatggcagtaacctcactgctgagctttgctaggccagactcaggctcccaccctcctcccttcctctgactctttcttctggccacccggggtccaggagctttttccactcaatctgggctcaggggtcacctcagagaacctctcaagacaaaggaggtgcttcaggggatctaacacaagtgagggcagattttaagactgtccatgcacagaaaatcctgtgaaaagaaacaaaccagccctacttgtgtctgcgcacctgagtccttaggactgttttctcctgatctcctggctgagtaaagattgcaaatgtgcggttcattatccagatccagagaaatccatgagagtttatgaagacaaagacgacaactaccctatctacttgtcacacaatgaagacactggccttagatctgtcagtgccctggaacattctggaagaagagggtgaaggttacttggcatacgttgggactcaaacatgaggatctcatgatgacccagagggataaaggtgggatcagttgtgagggtggaaaatgtggatttcttaaggccattttgttaatccttttctcattgcaaaggatttaaactgaaatgaacacgatttttctaataaatgcttatgaggctttccattaaatttaatcatatttcctgcctttatgaaaataaatatagaaataaaatatacttccataatgcattactgattgtgtatctttaaactagagggaaccattacttctaaagaaaaattactaggattgtttgcattttaatctgggatcctacatgatggctacagatacagctgttgttcaaggttttagcctggaatctctgccaattcaataacggaggcaataaaaatagacactagtattataaagacagaattcatttattttgaaagttttgaaagctatgaatatctaccaagaataaaataaattgtactgaaaatatattagaatgaattaaaaaatgccaaattcacaactaataaaatttattataaagttaaaaattcttatatttttctgtctcagtataaaaaataaacatttaatgtatctattagaaaataattagcaattttgtaaatgatatcaaagaaaatttgaacaaatggtgaaatattttcttatctgcggacaccaaattaaaaaaattcaggccaggtgcagtggctcacacctgtaatcccaactactttgggaggccaaggcaggaggatctcttgatccaaggagtttaagaccagcctgggcagggacgggtgcagtggctcatgcctgtaatcccagcattttgggaggctgagacggcagatcatgaggtcaagagatcaagaccatcctggccaacatggtgaaaccctgtctctactaaaaatacaaaaattagctgtacatggtgacgcatgcactcctgtagtcccagctacttgggaggctgaggcaggagaatcacttgaaccggggaggcggaggttgcagtgagccagatcgcaccactgcactccagcctggtgacagagcgagaccccatctcaaaaaaaaattagccaggcatggcttcatgtgcctatagtcctagctactagggaggctgaggtcggaggattgcttgagcctgggaggtcgaggctgctgtgaaccgagattgtgctactggactccagcctgggtgacaaagtgagaccctgtctcaaacaaacaaacaaacaaaaaaccaaaaaaaccccaaaataaaacaaaaattcaacagcatgtagattagtaatgttagtgctttatttttaaaaattattgttaacttatatgggttttcctctgagaaggtgcactggaaggtgtcagcagagcagatagcacaaactcctcagatttcagaagcaggggtttatggtaaatgaaaaatgccagtcacttgtcagcatgcacaggtggctatgcccgccctgtgtcaggctctgtgtcagtagtagggtgctccatgcgtccttttcagagtcctacatgccatctatgctcactcagccaggcctgtcacctggaagtaacaggcaactcctcctgcactggaattagcagcagagtcaggtgaataatgtggcctggccacaccacctctcagcaaatgtccccagtggtgatgcccgatagttcccaatcctccttaagtaattaattcacttcaattgaattaaaaaaatcaatcacttccctatgacacacaaggacattcactctctggctttaactatccttgcctgccttgttattatcattccatgtgcccaatactgtcaaaagatgtatttttgccataccctccacatgcatttcatatgtgtgatttttattttcaaattctatatctcttctaggaatatggtgtgttttatttgtcctgctgcaggactcccctctccactcagattaaattattaaattccagataaaaaattaacttggaatactgttgaatcaatagtagaagtaaccaaaataataaagatatttcaaaatgaagattgatttttaaaagtaaaaatgtcacatactccacctagaagataagagactgtactacaaattcattagaacatccccttcatgtcatgggccagtcatgtccctgaacttaacctctgtcttctcgggtgatgttacaggccaatgcagcatcagctgcccacactcctagtggtggaatctgggagcacaggcaggagtctgcgcctgtggccttggctgggtgaaagatgacatttccaagacttcttgcttggcagccatcctcacgtgcaggtggtctggcagcagcactgcaaaacccaggcaagggatgccccactgcaaggcccagtggtaactgtggtggccattggcattgggggcagatgcagccatgtgagttggtgggctgtggcagccaccctaatgatggtttccacccctcccagctggtggtggctaaaaccacccggtaggagtttcaaaagcagtggcaccattaagcggagctcctggaggaggactggaagcaactgcttgcattgaaggaatgtagctatagtggaattattgaaccacatcatatttgcaaagatgcagaatgtattacagattacgagatatggaagttgaggttaatctggtagagagcagtgaatatgaggaggaagctctctattgggcgggtgctatcatagctgcagaaggtgatggtgcaatgcttctgccagtgagtaaagtcttgtacaaacttaaaccagttacggggtaaaatctgatccaggactacctgagggtcacttatgttggcctgttcaatacacacatttctttccaggagccttaccaaaggtctatagtagtgagttcagtatggaggcagtaatcagatcatatctggaaggaactggcataaactccaatcctgtgggacatcatggacagcaactaaattcgaatcaacagagtagagcccttgacattggacaagttcgtggtgaaagatctgaggctttaggactccgacatttgtgaatgacagcactaaatgaagtctttactggtgaacgtctatccagaataccttatgcttgggctgtggcagtggataatttaagtagacccactctatttatttatttattttgagacggagtcttgctctgttgcccaggctggagtgcagtggcgtgatctaggttcactgcaagctccgcctcccaggttcacgccattctcctgcctcagcctcccaagtaggtgggactataggcacccatcaccacacctggctaattttttgtatttttagtagagacagggtttcaccgtgttagccaggatggtctcgatctcctgacctggtgatccatccgccttggtctcccaaagtgctgggattacaggtgtgagcctctgcgcctggctaagtagacccactctaaaagactggtttcttactgtgagatttcagttggtaatggtccatgggaaaaatggaagacttcagggctcaatttgtgaactggagcaagatcaaaggcaacagggttgcaagtcaggctgtggagcatgattaaaatattgcaaatgacaaggacgttggagtcttgcattcaactgtaaaatgacagaataacaaataaatataatgaatcattgttctagagtccaaaaagggccaaaagtaattttcagtattcaagaactaaaaagcaagcagttttctcgagcacccatgagcattgtttctcctgagagatttgtcctcgttttcattgctggaacacctgcatggttgtagatggaggaatgtcttttgatgttcctatttttatatcagacaagctttaaagcaacaacagttataaaagacaaagaaggaaattttataatgataaaaggatcggtccaacagaacaatatcacaatcctaaatatatatgcacctaatactggagctcccaaatttataaaacaattattactagacctaagaaatgggatagatggcaccacaataatagtaggggacttcaatactccatggacagcactagacaggacatcaaggcagaaagtcaataaagaaaaaattgactttaattatatcctagaacaaatagatttagcagatatttacctaacattctacccaacaacttcagaatataccatattttaatcagcacatagaacgttctccaagataaatcataagataggccacaaaacaagtctcaacaaatttaagaaaattgaaattatgtcaagtaccttttcagaccacaatggaataaaactggaaattaactccaaaaagaacccttaaaactatacaaatacatgaaaattaaataatctgctcctgaatgacctttgggttaacaatgaaatcaagaaggaaatttaaaaattgcttgaactgaacaataatagtgacacaacctattaaaacctctgagatacagcaaaactaagaggacagttcatagcattaaatagtctgaaacagcatgaacagacaatctaaggtgacacctcaaggaactcaagaaacaagaaccaaccaaactcaaacccagaagaaaagaaataacaaagatcagagcagaactaaataaaattgaaacaaaaaatacaaaagataaatgaaacaaaaactggttatttgaagagataaacaaaattgacagaccgttagtgagattaaccaagaaaaaaagggagacgatccaaataagctcaattagaaatgaaatgggaaatattacaaccaataccacagaaatatgaaagatattcaaggctactatgaacacccttatgcacacagactagaaaatctagaagagatggataaattcctggaaaataagttattatttgaaaaagacacttgtatggccgggcacggtggctcatgcctgtaatcccagcactttgggaggataagcgggcggatcatctgaggttaggagttcaagaccagcctggccaacatgttgaaactccatctctactaaaaatacaaaattagctggacatggtggtgcatgcctgtaatccccgctactctggaggctgaggcaggagaatcgcttgaacccaggaggtggaggttgcagtgagccaagattgcaccattgcactccagcctgggcaacaagagcgaaattctgtctcaaaaaaaaaaaaaaaaaaaaaaagaagaaaagaaaaagacacttgcacacatgtttatagcagtacaatttgcaattgcaaaaatatgcaaacagtataaatatacatcaaccaatgagtgaataaagaaaacgttatttttttatttttagacggaatttcgcttttgttgcccaggctggagtgcaatggtatgatctaggtttaccgcaacctctgcctcctgggttcaagtgattctcttgcctcagcctcccgagtagctgggattacaggcatgtaccaccacgtccagctaattttgtatttttagtagagacagggtttctccatgttggtcaggctggtctcgaactcctgacctcagatgatctgcctaccttggcctcccaaagtgctgggattatgggcatcagccactgcacccagccaaaaatgtgattttatatatatatatataatatacaccatgaaatactactcagacctaaaaaggaataaaataatggaatttgcagcaacctggatggagttggcctcgtttactactctgggtttctgtctgaggatgagggtgatgattgctgatcaggatgcggaaggaacccagtgctaacccacagcatctgccccacagggaaataaggcacaagtctcttgtttgatcccacgctatgacctctagacctactcttccctcttgtcaccaaaaccacaatcaggaaaaatttctgcaggcatttcaccatcctggaacaaggatctgagactcttcactgaatttgtgaccttctatccagccaatatttatactgagctattaagattaacatcttagcctggtcattgccacacaggcaggcaaggcagctcaggtggaaaatacttttggtcatcccatgtgtctgggcatatggccttgatgtgagtttatgttcatgctcaggacaagttatgggtcaggggactagtcagcttatgggccaggaaaaggtgctaaggtttgtggagtcaaagagggaattcacacatattaatgctccttgtttccacctaaggcagtttgtgaagtctgtgggttctgtgactgtccacaaatggagcaggaacattccttagaacggatgattgggaccccacaaaggaaaagacaagaggaagcacaggctacacaatgaaaatacacttggtcatgccaaaggctaggtcatgccaaaggctaatgaaagagctttgagtataattcagtgcctttggggttgagtggaaaatacaaaaaccatctttgccctgctctcacaccacaacaatcaacacgtttccatgaccaaatgtgtaggatttctccccaccccctagaaagcaagccattggttttgcagcggacaccacacaggtgccctctcattgaatgcaattctgacactatccacatggagacagggtcagatcttacagtttgagggctacttccccaagactgtgccccactacttacgccaatcccaagcctcagattgctttacctgtgcttctgtccaaatagctgtaagttgaagatttcacaacatctccttggcttctattaatttgctagaatggctcacagagctcagtagacacttacaggtttattaaaaaggatacaaccaagcatatagatgaagacatgcatagcacaaggtatgggaagtggtgcaccaccgtccagtaatcttcatgtgttcagccttccagaagttctcccagcctagctccatttgggttattttatggacgcttcctcaccgaggctttatggagtaaaccactgcccattggtgaataatcggcagcccctctcccctccacagaggttgggagatgaggctgaaagtcccatccctctaacactgccttggtctttcttgtgacctgcccccatcctgaagttacctagggactgtcagccaacagtcatctcattagcatacaaaaagactctggtgattttaagtattttaggagttgtataacaagaaatggggtcaaagaccaaaaccataatttataataacacagggatgaaaaagaaagtagaggttgatgatttcaagcccacactagtcctcattatgacagatgtggatttccaacccataagaggcaggaggctgaagagctgagacgaaacctgtgaaaagcagggacaggggacatttctcaatttcttgttactgaagtgatagagctccaccaggcctcacttggattgacaaactaaattaaaagatacactctttaaataaaaagcacttctgagcatacatccaaaagaatgaaaatcaggatattgcagaaatatttgcacatttttattcatgcagcattaatcacaatttcaaagacatggagacagcataaggtccactaatcattgaatgtttacagaaaatgtggtgtatagctgcaatggatgctgttcaaattcaagaagaattaggccgggcacggtggctcccgcctgtaatcccggcactttgggaggccaaggcgggcggatcacaaggtcaggagttcaagaccagcctgaccaatatggtgaaaccccgcccctactaaaaataccaaaattaactgggtgtggtggcagaagcctgtaattctagatactcaggaggctgaggcaggagaatctcttgaatccgggaggcagaggttgcagtgagctgagattgcgccactgcactccagcctgggtgacagagtgagactctgtctctcaaaaaaaaaagaataattaaattttgccatatgcagcaacagggaaaaccctggaggatattacactgagtgaaataagccaatcttagaaggggaaatgctgcacggcctcatttatatgaggtatctaatttttttttttcgagacagagttttgctcttgtcacccaggttggagtgcaatggcgcgatctcagctcattgcaacctccgcctcccgggttcaagcgattctcctgcctcagcctcctgagtagctggtattacaagtgcctgccaccacacctggctaatttttgtatttttagtagagacacagtttcaccatgttggccaagctggtctcgaactcctgacctcaggtgatccgcctgcctcgacctcccaaagtgctgggattacaggcatgagccaccacgtccggcctataggaggtgtctaatatactcaaccgagcagaaatggagtagaatgctggttgccaggggtagggagagaaggaaatggggagtcactgctcaagggctatgaagctttaggtttgcaaaatgaacaagttctagagatgtgctgtacaacactgtgcttacagctgacaacactgtattatgtacttaaaattttattcagagggtatatcacacattaaacgttcttattaacatgaaaaagggatagaaaataccatgaaaccacttacagaaagcaagtatggcaatcctctgtcctttgtcttgggagaaagttttggccaagagacaatttaggcaaaaaagagaatttactgaagaaaaacagagagcaaatagtttatttagagagacagtgtactctggaagataaggcagagcgggctgctgatagagaatgagccagcggcccgagaaatgtgcactgagtttttatgatattgcactttttcttggagttcccacctctgttttaagtctccacctttttttctttctctagtttttctgcttcagccttaagtccctgccttttccccacatagtttccagcccaggctgtgggaccctcccttaacacacacatgggcccagtgtttgataggaattctacctaatggctgcattgctcattactgccaccccaggaaggttgtatggtggtcaaatctatacttactgtacctgcatctctcttagaaatttctcctttgctctcacccctattatcagcatgcagctagctacattctgacaggttaacttcagagtgagtgaatactgggtgtcttaaggggctttgttctggcataggtatttaccctaatctctgttcgtatctagcatgtgtgctttgggtggtctctggggtgtgagattttccagaactcccttttctcaggggctgcccctcctgcttctgtctagctatctgcctactctaaagttagtattagtatgaaagcttttatgaaaaacatttttttccaagaaaagggaggcattttatactggtgaaataaggtgttcaatgacaacacataacaactgtaaattgtatgcacctaataaaatagctttaaagtatttgaagcaaaactgtctcttttagcagaattaaaaagagaaataatcaatccataatcatatacacagatattaatacaactctcttattaactgagtgaatgacatggagaaaaaagagtatacatacaaatacgtgaaaaccatgattaacaaaatcaatccagtgacaccaggaacccaagcctgaagggtagttgcttgagtatgcattcatggatgaacgcatccaatgaatcatcacaggaacaaacaattgaggccttcgtttatgtatttctaactgatgttaagtttttccttcctattctgtgagtagaggtggatccctgtggaaggagctgcccgggtctttgctccagaagctgtctgcattctcccctcactgtagcctcgtcacattaggccattgttatatttcccatatgtccttcttctagtaatccaggagccctcaatgaaaaggctgtttattaataccagtagctcaggacagagcaggggcatggctcatggatggtttggaccaggcccttagatgactgcactcacatgattcccactgagactgcagtctggccagtgagcagcaggggcactgtgggtctgtctcacggtctgcacagtggctattcatagctgtgccaacccctaaattccccagggctgggcagtggagcctgcactcactgaagccgactcagctgctgcatcttctctgggtgtggttccagcacccacttcctcccaggtcctgccagactctctcatccaccagtccccaggtcttgaataaatgcatagagtggggtgggggcaggcagtgggtgggacacatttgcatccataacccttcctctgtgaggccagtggaggggataagagaggcctagggcagccactccagctctggacctcgggagggctgtgtccaccatggccggggcccctgctcctccctgctgctcccctctcacttatcaggtagggacaggcctcagattcctgggaaagcctcccagtctgagttcttgccccgtgttccactctcacatttcatccctgcttactcacccatgagcatttgtgtttgcaggttccccccacctcggcctgttctgactcagccaccctccctctctgcatctctgggaaattctgaggctcacatttaccctgagctgtggcttcactgctggtggctagcacatatcctgctaccagtagcatctagggagtgctctctagtatctcctgagagatgatatatctccagtgggatagatatctcaagagtgggctcctgataaaaggataaagttcaaccctatttactcattttcacactcttctttgccctttttctctgagataatgcagcagaaagacccttgccagatttcagcatctgcttgtggacttctaaggtcacagaaatctcaaccaaataaacttttagtctcagtaagttacccaatatatggtattctattgtatcagaagaaaatggagaaaatggactaggacagcacgtgtagaacagtctgctaatctgactcaagtaagcaccatggctccagggtccccggtcacttttctaaatctaaagatgcctcagccaatgcagtaattctgcacatctctgggctgcagccagaggatgaggctactacatatctcagcagccatggcacttccacagtgctccagacccccagggaagtgagactaggacctcccctgtgttctctctgcctggtgcaatcaccactgtcctgcctgggaccaactctggctcagggattgattcctgttgttactttttcagccagtgtctaattttcctaggatatatagatgtaaaatgtgtttttttcttaaaatgttaatttgatatatttttcatatcttttccccttatgatgcctacagtggagtaggtcagttcttagagctaagtttccctccaggaagattacagaagaggaaggagatgaataacctacacgtgctgtcctagtccatttcccccattttcttctgatataatagaatatcatatgttgggtaacttactgagactaaaagtttatttggttgagatttccgtggccttagaagtccacaagcagatgctgaaatttggcaagggtctttctgctgcattatctcagggaaaaagggcaaagaagagtgtgaaaatgagtaaatagggttgaactttatccttttatcaggagcccactcttgagatatctatcccattgccaggataagggcactaatccattcatgatggtggaaccctcatgacctaatcacctcttaaaggtcctgcctccaattacttttaccatgataattaaattctaccatgagttttggaggggatattcaaaccatacacatgtcccaaactagggcctagacctgacttagagatgtgtgtggtctgagaacttctgatcagctggttggtccagcatgccccaaccccagctccactgaccagctccaggagtgagtgaggtcaccttcctcacaactgctcattccagcctgtctctgaactgttcactcctcttgaggttcagaggatgcaggtctttgtggttccagggatgttgggcaaacagtcttttccacagtggaatatgactgtgcttgtgacttcgcagtgtgcagaggacactcagcacctgcctctcccccccgactttgtcaggcccatgattatcaccctctccttcatcccaagttcatctgatacgcatgccaagatttcagtgaggctggggacacataaggatgatgatactaaaatgaacaagttccatttcataatagtggcagaagatcagagatctgtaggggagttgtgcccccactctgagtatttaggaagcaactctagggacatcttgctctgcttctcccttctctgcacaggtgaaagaaggagcctgtgcagacaatcgttcattagaagctcctgccttcttcctcttttccaccccctaggactggatggggcctttgtaatggcttcaaattatagtgagagtcaaacaagacaattggtcaatgactccaacatccctctcagggctgcctgacatgagacaggatggattgcatctgatacacccccacccttctttcttatcggtatattaggtttttcttattgatgtgaacacactctatattacacaaaataagttatatttatatttcaaacctgtgatggtgatttttaaattatagtaaaaatatacatataaaatttaccatcttaatcattttaggtgtacagatcataagtattaactatattcacattgctgtgcaacagatctgcagaaattatccatcttgcaaaactgtagctattgaataacagctccccattttcctgcctcttgtggtggttttaaatacaatgcaatacatactagctgaaaatggaaaaaagaagtatatgaaaatgttaaatgcatagcacaaaaaatgaataatagggtcactttggttataactttaaatgagaaaactcaaagtaaaacaacaatctatgatatatcatataaaatgcacaatttaaaatttttaaaatttaatattaacaaaaatatatgtaatacaccacataagtattcaataaaactgaatacaattatgtttaatttttttaaactgtgaaaaagatcctattaacttttgaatatttacgcaaggaaaccaagtacatctcttcttgaaaaagtttgattccaattttttttttctttttttttttttgagacagagtcttgctctatcacccaggctggagtacagtggcgtgatatcagctcactgcaagctccgcctcccgggttcacgccattctcctgcctcagcctcccgagtagctgggactataggcgcccgccactgtgcccagctaattttcttttgtatttttagtagagacggggtttcaccgtggtcttgatctcttgacctcgtgatctgcccgcctcggcctcccaaagtgccaggattacaggcgtgagccaccacgcccagccagtttgattccaattttaacagacaggtgtttttgacaaccagtttattttcttactgaaattttctttttctttttttaaaaaattttaaatctttaatttccgttttcacttattttcttcttgcttccaaaaggaaaggagtgcgtagctctgttgcctgtacatcgtccacagcccctggctcggggcagggtcccctaggccgcccgggggtccacatgcagcccctggggggccggcgcggggtgaggtccggccggttggggccgccgctaggcgcgctggctgggcagctcctgggagatgaagcgacgcaggcgctccaggtactggctgtagagctcgatgtcgttgtgtccggcgccctccacccacagcggctccaccgccttggggcagcgctcgtagagcgccagcccgtgtgagaagtcgatcacctcgtcctctatgccgtggatgatgagcacgggcgacgtgatcttggacaccttctcgatgttagggaaggcgtcgaagcagtaggtcttggtgtcggggaaggcgacgcgcatgcccgaggtgagcggcgagtgcagcaccaccgcggcacactcgtagcgcgaggccaggtccacggtgggcaccgtgccgatgctctgcccgtacaggatgatgctgtccgggctgatgccgtacctggcggcgccggagcagggtcagccgcggcctccgaggcgcgcgcacccttcccaccagcgggcgtccccgggcccagctccggatgcgaccctctagtctccccactcagccaagtcagtgggtcaggcccaggctccacaccagtcccgagggccacccccagcccccaacaccgcggcggtgggcgaggccagcggccccgccccgttccctggcgctgccgttcactggcgtttcctagcaaggatctgcagggatcccgcctacggagtgcccctggggcaggggtaggggaggccctggcgcctgttctcctcctggtcacccctaggtgcacactgggaactgtgtgccccccacatcctgaatgcttcaggcctccctgcccgggttagaaagccgttcctggtgcactggccaggacagcggacactcttccttcctgcagcccttgcccacccccttggccatgaggaattcaggcagctgtgtccccagatgtctccacccaattttggactctcggagtccccacgcccaatgagatgccagtgcaacccaggtcagcatcgaaggtggtggctgcggaggtggcaccccctcccaccagcaccttcccttgggagtggacaagtcctcggccacctcagcaccaccagctcccacccagggccacccccacccccaggtcattggtgtgcggcccttgacccagctgatccagcaccagttacaaggcctcctcgtacccagtcccaaccacgcgggacccacctgccaccctgcccatgccaggaccccacaactctcctcccacacgctccaggctctgatcccaggcagacaccctcttgcaaggcaggagcatgggcaggtgtgcgtcccctctgcctggcattcggactccaccagcagggctgtccccgtccctggcctggaatcccagcctcctggcagcactccacagctcgccactcacccatgccccaaaggatgctgcctggctggtacctgtggccccagctctgcctcggcctccctggcctgctccctggcagccatggtcagtagtgtgctgagccagcccagccctgtcacctgctacaggcaggagcccccagctgccacctggatgtccccactcaaatgaacgggacacatccccagtggaggccctgggcacgctctggcctccccctcacagctctgggcctaggttcctgcaggacaaagtggcagcaggacagatggccgagcagacgagctcagagctggccatggcgggtgtgactctgccagtggcccaggcagtagagacaggaggggccgaggaagtcgcatgaagtggtacttggtgtcagcgccccacactgctgggaggcccccagagccagggtggtgccaggggaccagctcccaggcccacagcagggaccgcctgcaatatcaccaaggcaacgaggaccccacctccccagggcctctgacttctcagagttgtgcctggtcccctgtgggagcaggtcagaccagtgggctgggcagggccaggatgagacagccccagtggatggcgagcaggaaaggccgccagaggcccacccgggtctcctcgtccaaagcagcactggcccgggcggtgctcaaacaccggtgaagggcccaggcaagcgcagggctggggacctggatgactaggagggctggatctggaatcgaggctggcccagacctcgggtgtgtgctgggggtctgcaccttaccctgcaggccctgccccaggatggccaagctccgcagccacagggcctcatgggccaggcctcgggacctggatgcagcagcctcgcctcacttggccccaagtgctgccttggcagatgggctcccagccacacgtgcacagacccccagaccaccacccactccctcccaccgggtggcatccacgcccctgtgacaagctcagccccttcccgtcctcaggccaggggttccagggagcctggctccacaggccagggtgtgggaggaccgcctggccacacctcagccatgtggaggtggcacctgcacacccaagctcgcctgtccggctctctggccctgtgcatccactgtggctcccctcctgcagggccgcccaacttcctcccagggaagcccgccccccggcccccggcttggtcccctcttgggtgtgcccaggctgagctgcccccagggtcgccctcacctggtgtgcagggcctgccaggcggcgtcgatgtcggcatagaggttcctctcggaaggcctgcccgcgctggcaccgtagccggagtagtcgtagaagatgttgcaatggaggcgggagcccaggccaatgtagaagctgctcatctggctcaggtccacggcgttgccgtgcgagaagaagaccgtgtacctggcaccaggcacgcagcgaacatacatgcaggagacgcggttgccgcgggcgctcttggtggggaagacctcgatggtgtccagctcgcgctggctgtactggaagtcggcgcgctccgtcaggtgcagcttccagcgcccaggtgcgcccgaggaggcccgcagggtccccgagggggcggccccggccccaccaggccccggctcaggctcaggcaccaggaaggcgagcttggcagcgatgcggccggggcagggcgggcagcaaaggcagcagagctcactcagcgacagcccattcatggcgggcgccgcccgggccgggcctccaccggggcccccgccaacaacgccgcctggcctggcccggcaggggaagcgtgggggtgctccgagtcgcgggcaggggggagagcgcccccccagctaccgccccagacggcagccccgttaggaggccagggcccagccccatcgcggtccaagccgagccccagggagcctcgcaaccacaggtctccatgtcgtgccctgggaagcccatcccggcccgcgcccccgggccccagggccgcgctccatggctcccggccgcccgcccgtgcatccgtcggtccctctgcgccccggcccggcctcctgcaccgccaccgccgcagctcccccacggacggaagtgagtttactgaaattttcaagccacagaaagaacaaaagaagtaatatccattatattgtccaaaacaatagtacctggaagatctggaggcaaaaatgaagcctgagaatagcaggacatagacatatttcataacatagactcacagcagaataatggttatgttggttcattagggaagaaaacactaaacagctcttgcagatacactcaatatacagtaagatagcttgtgattttaacgagttagcaaagcagaacaatgaggcaaaagcaaacagaaacactaaaagaaatccattccctagaatcatttttaaagactttgctagatttaccaaagaattcagtattgacttattctgtctccattttatttcataatggaacccgtctaattttatgctaaatgtatgctgtaaggacaccttgctactctgaaaaaataagggatcagtggataaaagaccatattttattaaaaaaagagtgtgttttgatgcatgattttgtgactctacatttttaagtaaggatgaagaacttggtgattaattaaatgattcctcagttgctcatcaatgccatcagatgccttgaatatactgtgaggacagcatctggaagaaatggaggagatctgagtaataattcagatggagccaatttccacaatcttattttcccattacctgcagctctgaatttaactaagtctctgtgttaacaacttgtattgtttatctgggtgaatgacctcagaagacaccaggcagctggatgcctgcacttctttcgtgctaatggttcatatagtctcctcacccccaacactttgatacttccttgaaactggattacatatgagatagaaacaaagaatgcaggtggcataatgactctcaggagtcactgaatctgtgttcatgatgcattactgtgccagctgcctccctcttcttgtgaaggcccttctttattccttgagatgtgctcatcatgaaatagctacaagcatatcatctgcttgccttgcccgttatagcaaccatgaaaataaatttgcagcatcatatatagcccaaatattctcgaaagatgatcctaatagctctaataacaaaataagttttctacagagtagctatatgtacatgctctcagcttatgtaaacttgtgtttttattgctcttaaagcaaaatttttcctaaaattgagaaaagaactaaagttctttgtcattatatgaagaaagatacagcatctaatattgtgaacttctctattttgagatgttttcagacatcaagactggataataggctgggcacggtggctcacgcctgtaatcccagcactttgggaggccgaggcaggcggatcacgacgtcaggagattgagaccatcctggttaacatggtgaaaccccgtctctactaaaaatacaaaaaaattagccgggtgtagtggtgggtgcctgtagtcccagctacttgggaggctgaggcaggagaatggcgtcaactcgggaggtggaggttgcagtgagccgagatcacgccactgctctccagcctgggcgacagagcaagactccgtctcaaaaaaaaaaaaaaagactggataataaaattatttaacaattcggaacataaatttagaattgaaaaaagctttatactatactatactatactatactatactatactatactatactactaacacattttgtttgagcatggttgccttataagtttttggtagttcaatgaaaataatggctacttgtgagaaaactgaaatagactaggacatagtagatagagatagaaagaacaggtaaattaactgtctatgccacatggcaaagaaagtttacagtacgtagtcattaaacgtacatgcttataaatatataaccaatgatgaataattttaaatgcaatttagcagaattcagaccgttttatattaaacatatatttctgaatgaaatataaaatctattgaatgagggagacactttatatgtgtaattaatctcataaatagagaagacttttacaatagtttgtacactttagctataaactgtaattcaagagattcagtaagagtagctttttgtaacttaaatattctatattttccctgcatacatttttgcctttgatcatgtattttatttagcctgctaagatggtagagaaggtacagacagtaagcttttcaacctgacacataaattcaggttatttgaaaatggaatggtaaagtgttactgaagaacttttactatggttcgcatttggtaatatttcctaattattctataaacaaaatccaaaaaaaccttgatttcataacataaacttctgaggtctaaattaatcaataaaataaatttgttttaattaattattagattaaattatttatttaaataattatttaaataattatttaaataattaaattaattattagattaaatactagctgaggctcattagaggtaaactagagaattatcatcccattaagataaattttgattcagggaagtaacatcttggaagtttactaaatttaaatttaggaggaatttactaaatcaagtaccaagattttatttctgcaccaaatggaagacatatgtaaaatttaaatacattccattacttaatttactctttactatcatgagaattagtatagacagcatattttacacagagcatacaaagccttatcttcattgaattacaagtaaaatatatgtatgtacatataattatatatgtaatttagatattaaatgacagaatttacttatttacctgtgtgtgatggaatttgattctagtaattattccaggtacagtaactggttgaaaatgggacatgaagtaaactgatatgcttacaagtaattacagcaagcgaattcattgtaatgtctccaagcaaagcaagactacccacatgagataagaaatgagaggctacttattttgaccaagttagctcggtgacttggggaccaaggactacatgcacatggatgcttcttttgtacccctacccctgccaaaaaatatgtttccatggcaatatttgggaacccattatttcccaattgatgcttttactttcatataagacaacagttgatactccaaaatcaacttacattttaattaaccaaatacaatgttcctaaagacaaagagaaacatttcataacaataagagttaagccaacagaaagatagggagtatgaaaaaacagagaaaatcaataaaccaaaattaaatgcttgaaaagacaacacaattggcaaatgtttatttaggctaagcaagaaaaaagcagaagagactcaagtttctaaaatcagcaataaaagagaatccatcactgctagtaatacaaaataaaaataaaagacaatgcaatgaaaatcttatgctaaaaaaattagatagcctagatagaatgaagtcctagaaagacacaaactaaaacagactaaaggactaaggagcaatagaaaatctaaatagacctacaaaaggtaaaaagattggattgtaattttaagaacttataataaaattcccatctcaggtagctatcactctgagaaattaatatcaattgttcaccaactcttgcagaaaataaaaggggagagaacacttcccaattcatcttataaagccaggattactctgacaccaaagctatatcacaaaacaatatataacagtatctttcttttttttttttttcagatggagtctcactctgtcgccaaagctggaatgcagtggcccaatctcggctcactgcaacctgtttcctgggttcaagtgattctcctgcctcagcctcccaagtagctgggattacaggtgtctgccaccacgtccggctaatttttgtatttttagtagagatggggtttcatgttggccagactggtcttgaactcctgacctcaggtgatctgccaatctctgccttccaaagtgcgatataagtgtcagccttatatcacggtgagccactgtgcctggcccattgtttaaataaaattaaaaatcttcaacaaaatactggacaaactgaatccagcaacatataaaatagattatacactatatgcagatgtgatttaccccagcaatgcaacattgatttaatatttgaaaatcaatgcatacaaaaatcgcattaatagaataaaacacaaaaatacatgagcatctcaacagaaagtatttgagaaaatattacacattttcatcataaaacactccagagttatggacaagaagataacttcctgaaactagtggtagttatctatgaaacccacagctatcattatacttaccaaggagagagtgaatgactaatcagaatgaccactcttgcaaattctccctttttcaccttcctgctctcatcaccctcttttgctcctccatcttcccaaaaacattttcccccatcttttcccaaagccttctcccctctcctgctgctcaccaccattttatccccctccacctaccccaaaacttttttctcacacccccaccatcttttcacaatgccttctctccactcctgcttaccaacctcttttccccactcctgcccctctcccatatgccactcttttttcaccctccatctaccccaaaactatttgtcttcccaaccctcctccccctcatgctcgccaccatcttttcctcctccatctacccaaaaacttttctccccactgtctttttgcaaatccttccctccctcccgcttgcccattttccccacctttaccaacctctctttactcctcccacttgccaccctcttttccccctccatctgcccaaaaactttttacccaccatcttttccccaccctgttttcacaaaaccttttctccctcctgctcagccccccgtttttccctctcctatttgccaacctcatttccccctccatctacccaaaaacgtttttttttcccaccgtctttttcctattgcctttttgcaatgccttctcctgcttgccatcctcttttcccgttggtactcaccaccctgttttcctcctccatcgaccccaaaactattttccccctcttaccactccggtcgcactgcagtcgccatctcggccaccacccacagtgaggcgagccgcggtgccgcaggctgcagcctccagcatttggcaggtgtcttccttccccttctcctctgcctttaagttgggcacagaagagctgtgtaggcaaacaggaaagaacccgggatggtctgactcccccacctcagcatactttatatgcggagttatgcaaatgagttctgggactacatgttctgattggatgagagaaaaacctctaggcatacttagattggactttgttatcatgttctgactggatgagagcaagtcttaaaacgaccaatcagaacatgataataaagtccaatcagagtaggcctagaggtttttctctcatccaatcagaacatgcagttcaggaattcatttgcataccctccctgtataaagcatgttgagtgggcagagtcagggtcttccgtatattctccccgcaccatccgtgctcggcttagtgcaggaagaggagaagaacgggaagacaaccgcggcacagcagcttacgtgctgatgttggctgtggtgatggagcctgctaccggagccacagtggcccacagcgggagcatggccagagtggtggaaagacagtggggcaggtatgctatcagagctgcgctgcccgcggtgagggcagattgggggcgctatctggggttgcattgcctaggtgggttctgtgcagtatcggggactacgttacttgcggaggtggaacaggggaagggggtggggtgggggggacactattgaggatgggattaggtgtgctatcgggggccgtgctgatcatcaaggcagcttaggtgtgctatcggggcaggggacacgctgctccgagttgggggatgttacaggggctacactgcctgtggctggcaggggttaggggcactatctggggctgcacagccggtagtgggtggcgtgttagggacgctataagctactgtgttgtctgtgccccagggagggttaggtgtggggttgggtgtgctatcggaggctacagtgctagcagacaggttaggggcactgttgggtgttgcaccgcttgtgccaaggggtatgtttggtgtgctatttggggctacaaggggcaggttgggagcactgtcgggtgctgcactgcccatggcaaggggtgggttgggtgcactatcaggggctacactgcccagggcggggcgggcggggggggcgtgctatcctgggcttcactgcccatggcggggggctggttggggacgctgtcataggttgcattggggtggtagggggcgggttcggtgtggtattgggggctgcattgccagcagtgtgggggggggggtggttgggggcactgtcaggagcttgcgctgtcaagctagtagcaggttaggtgtgctattgggggctgcactgcccgaggtaggggggcggattaggtgcgctattgggggctaaactgcccacagctggcggggtttgggggctctgttggggggttgcagtgtcagaggcgggttaggggcattatcagctgctgcactacccgtggcaggaatcaggttgggggcactatcgggtgctgcaatgcctgtggtggggacgggttgtgggcattatcgggtgctacactgctggcggtggagtggttgggggtgctatcggggtcacactgtcagcggcgggggacaggttaggggtgctatcggatgctacactgtggtggagggcagggggtggggtgttgagagcgctatttgaggactacattgctggcagcggggggcggattaggggcactctcagggctgcactgccggcagcaggcagcagaggtggcagtgacagcagtggtctccacggaaaggacagtccttccctccctggactccaggctttacaaagcgattttctcctgcttaagtacagaggacatacagtgtttccgcaggaatactgagcacggcagggccccccacatctgctgtggtttcctgggttacaccctctcgctctgtgttgtggatactgcctgggacccccaggcaccgagtaacgtgcaccacgtgggggacggtgctctctgggtggaggctcaggaatgagagcccgcacttgggtggggagagctggctgggtctgactttttgctgcttccgttcccctaggaccgcagctctggtgggcccagtggttcctgcggagtggggagccgggcactgtggtgtctccagtccccaccacaggctccgattcatggccagcttgggccgaaaggggagggtgggtgtcagtgccttcgctgaaactggcacctgccacccagtggccagcatgaccaaggtgaggctttaatgctaccactccctgcatctgttctaggtttttctggctttgcctgcccagcagtctgtgcccacctagaggagtaggaggggccaccatgccgcatgctggaggctggagcccgcagcctgcagatggcacagtactacagctcgccttgctgcggttggtggcagtgatggagactgcagctcgaccccagcgatggaggctggaggtaggagggtacctggtggtggccacgtggtaggagccttgtagggtggggctggtgcattgagagcaacagcagcagtggttgtattggcatgggcattagtggtggcagcagcagcaagtctgtgagccgggaagggggtagtaggagccctgcaaggcccagctggcctggggtgggtaagaagcagtgggtgctgcagcatgggcctcggtggcagcagtggaagtgcagccagggcaaggagtcctcccccacctttctgcagtctctggagggcgcccacctcctgctggctcctgagccaggcatgagtggcagcattgtctcattcttaacaaaatttagggaatgactatttgtgtatctttttgcttgttttttgttgtgttaatcttggacttttcgaatttcatgaatcagggagtggataaaaggtatcataataggccttctaactctatcacctgatttttttcctttcttccagtctgttttttcttatcaccatcatcttgttctttattttcttatgctgctgcctatatttctggtttctattcttgtttctctttctggtcctcctgctttttgttttctttatcccaagcaatggccttaacaaactgaaactgagttaaaagtaaactacttgctagtgtgttgtatttttaaaataattggtccattactgtgttttagagatgagaaagtagttgcataatgatttagttacttgaatagctttgctttcgtgatcctgttaatgcgttgtaagtagttatgcaaggaatgaaaaaatgaagcatcaaataaaatactgatagcaaacagtcatttcatctctctcccatatagtctggagataaatgcaagtcagggggttaataagttccaaaaatttatgagatcattaagtgaaccacattcccttcattttatttttctgccacagttttcaagagcgttgtcatttgcatgagcaaaccttgttcaccacatctttgcaacagggaagggaaggggaggatcatatgtacaatgttttaaggcaaaaaaactcacaaccaaaagcaaggctttattaactttcaccttcgagaagctgcagtgttgagccctgttttattcctagtattactgcctttgatacgaactcttaagtgatcactttagaagttaatgcattttattgactgctttcaagaaacagtctatattgtatcatgcatgtttttcaagcccgcagaattgtataaggcctatatatacatagggcctataattttgacactttttaatgatttataaggttacgatcatgtaaaatcctgttgacacgtgagaatatgcctaagtaccgctagatagcttattttgaagagatagttattttgaagagatagaaattggttgcagtttgttaggtgtatttgtcaatgcattgcctcaatgctttaaagcatatagaagtttgaatatgctttaatctcatgtagtcctttgtttatagggtgtttaatatttttaaagactaaagatgtcacagccccctttaaggttcagtaatattaagattggagatttatagggttagaatccaacaaattcagaggaaaattgttaaattatatagctgtagagcaggaaatgaaacccaggttctaagctctaaggggaccatgagctgccataccaagtgcatcagtgactgggcatagagttggcagaattacaggatggttaagagagtgagctgtagagcctcactctatgtgaacatgaattttatataagtatgtatgtatttatttattttgagatggagtctcactctgtcgcccaggctggagtgcagtggtgtgatcttggctcactgcaacctctgtctcccagattcaagcaattctcctacctcagcgtccccagtagctgggaatacaggtgcacaccaccatgtctggctaatttttgtgtttttagtagagttggggtttcaccatgttggccaggctgttctcgaattcctgacctcgtgatccacccacttcagcctcccaaagtgctgggattacaggcagccactatgcccggctgtgaacatgaatttttaaactgcatggtgctttgggtcccagcttctccatctgtacaatggggacagtactaaggttttctttttcttctcagttgactgaattatttccatagtctgtctgtcttgccactcttgttacccacacgaaaggacctaaggtaatttctgacagcctgggactccttgtgcaaaacagaaggtgccacagacctcattttaggagaaacctttgttttcctcttggaaccccaagaactgtaagcagacaggtccatctcaaaatccaaggctctgctctgttttgctttgctttacctgactttttttttgatttgggtgggcatcaaaaattagtaggggagagctaaagaaagttgtggatatgaacatgtatttatggtaaggtaagttatgaaggagagaaatcttaggatcttgtatggcaaattcttgcactaaagtagataatgactaattaggaaagcaggaaatataggacaagtcagaaagtcataagatgggagagaaaagcttacgcctggtagatcctctcctgtctagaagtgtcgtatgtgtgatgtttatatgaaggagctctaattaattggattaaaagataatgaaagctctaaaattgtcagaaaaatagaagctctaatgccttttatttcacgtgacttcagcaatctttgggaaatgagagttttaaaattattggtggtaaaaagtcttcaaaaagtagacatttggtctaaattaagtcagaggttaaattggctaagtgctttaatgtcataaactgcttctttgactttggaaaattgttcagtttacctaatttggaactgttagatttctaggtaaggcctggggagaggtggagttagccatgtctcctagctatgctggaagagttagactttatctgcagttctgtcatgtatcctggactctgcacctggtatgtaattgaaactgcttacattgaaaagaaaaattatgtgtttttggttttaaaaggggtgggaatatggttttttccaaaaagtgagttttggcaaatttagaaagtttaagaattatttttagttgtaggaaaataaagtttaagcaagttatagaaggtttatgaaaattaactttgtaaagaattgtgtgtgtgagcaagttgactaaagggacagtaatgttagatgtaataaatgcaggtacccttccactttatcttctgtttcttaggttataaatattcactacctacgtttctaaaaactctttcactataatattaacacataactccattctccttgtattgcctgctttttcatagtatcctgaaattgcattagtagatttagattcagaagatggtggggaagcatcttatgagtgttttaagtaaatttaaggcaaagggttttctgtacatgggtggttatcacagcatcacttgttgcagcaaaacactgggtaacaacaatgtttatcaatgagaaattgttcggataaatgatgatttgtgccttgcgaggctcaactattcaaaagcaccctcttttcctcacttgctttacctttggttctgggcctggagcctttcagaggttactcaggaaatggactcctgtttcctgtgactaatctggacagcggcttcctatttcattcttcagcatcttccaaaaatttctgaagataatttcttcctttgtgaccacccatactcttggtttactttgcagttaacaatttcatgccttcactagattatctgtgtgaaggtgtggggtgtatgtgttcatactctggagggagcagaggaaaatagccacagccaaaggagtaatcttgcactaaatactcattataagaatgttgatacgttcatagatggtaaatctgtcagtaatttttacttgtatgattcttggttaagactgcactcactggtgataagcgtgctgaagggatcataggtgctatacttatgtgtgggaattgcattcaaaccaccaatgcctgtctactcaagttttgttgccttttgattaaaaactcttgggaatgtttccctggcatgcaaatatgggaactgcagtttgattctaggtagaaactctttggtagttgaaatgccataataagagacacagctgtcaatgggcaacaattcactgttggtaaggaatttacagtgctacttgccatattcttctttatccagactttgtgccaagaaaatgaaattctttttaaaaatttttttctagagtaatcctacaatattgctgttatcaagcctgatgctgtaattagtagaaaatgtctagaaattaaaagaaaagtagtattttccaactatggttaaattaattgcaaaataacttcctcttaattgtcagattggagacaagcttattaagagtgaaataaaacataatgtgttgctggtgctaggtacctctaaagcctttgagcactttcttctttataaaggctcaatctactcatgtgtcctgtaaataatcctgctctaccagcatcctatgtaaattttaaaaattatagttcatatattagattgtaacaaatgttgttcttctttaattatatgcaatgcaatcttgttatagactcacattagcttgccttattccctgtatgtttgctgtaaaatgtatagtccttttcaatatatgatagcttaaagatggacttaatattttgttttagaaccaaaatcttttatcttatatacaggaaaattacattggaattcagagatcagcaaacatttcctgtaaaggatgaaatagtaactattttcaggtttgctcagcatgtggtctctgacaactaaactctgaagtcataccaaggcagcatcagtaatgtttaaatgagtgaatggcgctgtgttccaataaactttatttacagaaacaagtggtgggccacattttgactgcagggtatagtttgtggacccctgaacaatggctttttctgaaacaacacaattgaattgagatttgaaagaatgttgaggcagcattgtttgtctggggtaatacctgaggtttgtcatctcacaccagggaaatcagggatgtggacacacaagaagtgagttcaagagtggatgattaataggtgaaagaaagagaaaagagaacagctctctctcctgcagaaagagagaggggcacctgagtgggtcttccggttttgtggtgaaaagcacaaggttttataaaggagcttgaggaggtggtgtcttgatttacacagggctctagagactggttggaccaggtgtgaacgtttgcatagcacagggagaagctggccattgcaccctaatcttttattatgcagatgggttctttaccttaccaggaccatattgtctgttccttactgtacctgtggttgacagagaaaagggaagatggagccaccatgttgaacatgcctggcccacaggtagccttttcctattggcacagctgctggcattcctatgagagcttatcaatgtctgcagcccaattttacaagatgctctttgttagaaaataaatgatatgggttttttttttcattagtaggaaaactttacactaggacttccttactttcagtatctgcctaaataatttctttttaattcctacatcaatgttgcatgtgcaatagagaaggtgacatgtagggagctgtgtcagcaggggttgcatatttcttgatgagcatcccatgatgcattcttcttcacttgtggcaacattagcattaactaatctacagtaaagtagatgggtccacaggtcatgggacatacactagctctgccaattacatgttgatttaaataatatcattctctaaggacagctttttttcccccagatcctggtatgtatgtggagttggggagagacaccaaactgtaccccatttcctcatacattgcttatacttttagaagtgtttgaaagataatatcacatactagtagtttactgtttcttattcaagttagttttaatagtcgctagggtgaatgttttcaaaattgtatagatattcgggttgaggcaatactataaattatgagttcatctcagtttttttgtgctagcgtaatgacatttcggagacataatgcatatgtgcaaaatacttcacctctctggaaaacagtaaagggctacataataggacagacaaaaataaaggcttggcgtaatggctcacacctatgatcccagcactttgggaggacaaggcgggtggattgcttgagctcaacagttcaagaccagcatgggcaacatggcgaaacccatgtttacaaaaacgataaaaataagccgggcgtggtggcatgtgtttgcagtctgagatacttgggggactgaggcaggagaatcgcttgagcctgggaggtcaagggtatagtgagccgagatcgtgccactgcactccatccagcctggataacagagtgagaccctgtctcaaaataagtaaaaatttataaaacaaagaatgtttctaactgtaataaaggagaagtgatcaagcttaagtgtagcttagatttaatctttgatttccgggtactatattacttaaaaatatgatttggatatttagaagttgttcaaattagaaactcaggagtggggtcactggtcactaaggtgctgaatatttttaataccttagtggatatgtaatcaacaaagccaacggaaccaatagagcatttgctttcataagaatttaagtgttgctgggtactcttaaatcgagctcacattattggtgtcatttaatataattactgaatttctttgaacccagtttccactttttaaaaattatttagctcattaggctgaaaacttctctttgttacattttattacacttcagtgtaatatgtgtaagatgtacattgcttctctctagaaaggtgagacaagttgaagcagggttgggggtgggtgcttccagttcataggtaaataggagacaaacggttgcattcttttgagtttctgattatcctttcactgaatacacaatttacatgcaagatgccatagaggaatagtcacttatgcctgagtctggcttagtgaatctgcatttttacataaaaaactgggcagagaaagccaatcagatacacatttgtctcaggtgaggagagggatgactttgggttctgtcctttgtcccccacctgtaaagataatctatcaattgccaatttatattgccagggtcaaattcaacagaactgttttagtgtaaagatcttgaggcccacaagaaatttcctttctgacaaattatgagggaggtatatagctttcgaaatctttgtagttatttttttattttattatttgggttttttttttctttattgacaaataattgtatatactcacagggacatagtgatgtttcaatacagaaaagttatagtgagcagagcaggataatttcatatcctttgttaaaggaaaataaatctccgggacaccccactaagccaaataatagttatcttatttagaaataaaatgggaggcaggtttgtttgatggagttcctagctgaggtgggagaattgcttgaacctgggaggccgaggttgcagtgagccgagatcgcgccattgcactccagcctgggcaacaagagcgaaactctgtctcaaacaaacaaagactatagaaaagctatttgtgaaaatgctttttgatgtgctgttttatgtcacagaatgcaacctgtgttttgattcagcaagttcaaaacactctttttgtggaatctaagaattgattattttgatcctattgagctttcataagaaaatatgaatatccagttgtaaaaactagaaataagctataagctatctgtggaatgctttgtgaggtgctgttttatatcataaaattgaacttgtgttttgattgaacaagttgaaattactcattttgtagaatctaagaagtaacgttttggaacttcttgagcccttattaaaaaatagaaatattcagtcctaaaaactagaaacaagccatccgtgcaaatgcattgtgatgttctgttttgtatcataaagttgaacctgtgtgttgattaaacaggttctgaacacttttttttgtagaatttatgaagtggcatttctgagcctattgagcccttatacaaacatacagttttaaaagctagaaacaagctatctgtcaaaatgctttgggatgtgctattttatgtcacggaatgaaacctgtgttttaattcaataggttcaacacattcttttggtagaatctgagaagtgacattcccaaacctctgaggcctttaaaagaaaatacgaatattttcctctaaaaactagaaacaagcaatgcgtggaaacgctttctgatctgttagtgtcacagattggaaactttgttttgattgagcaagttcaacgcactctttgtaggatctaagtagtgacatttccaaacctattgagcccttataagaaaatatgaatatttagtcctaacatgctatctgtgaaaatgctttttttttttttttttggcacagagtcttgctgtgttgccaagctggagtgcagtggtgtgatctcggctcactgcaacttctgcctcctgggttcaagcaagtctcctacgttagcctccctagcagctgggactacaggcgtgcaccaccacgcccagctaatttttgtatttttagtagagatgtggtttcaccatgttggccaggatggtcttgatctgttgacctcgtgatccgcctgcctcagcctcccaaagtgctgggattacagacgtgagccaccatgcctgactgaaaatactttttgctatgctgtttcataacacagaattaaacctgtgtttttgtgagacaggttccaaacactctttttgtagaatctaaaaaagtgatgtatccaaaccttttgagccataataagaaaacatgaatatttagccctaactgctggaaacaagctatctgtcaacacactttgtgatgtgatgctttatatcacagaaatgaacttatgttttgatgaaacagattcaaaacactattgtagaatcttaagaagtgacatttctgagcctattgtgaccttataggaacatacaaacatccagtcctaaagtctacaaacaagctatcttggaaaacactttttgacgtgcagttttataacacagaattgaacctgcattttgataaaaacacgttcccaactctctttttgtagaatctaagaagtgacatttcgaatctattgagcatttacagtaacgtatgaatatcttgtaataaaaactagaaacaagctatctgtaaaaacactttgtgatgtgctattttatgtcacagaatggaacctgtgttttgtttcagcaagttctgaactctttgtagaatctaagaagtgacgtttttgaccttattgagcccttataagaaaatacaaatatccagctataaaaactagaaacaagctatcagcgaaaacactttttgctgtttcatatcacaaaattgaacctgtatactgattaaacagtttccaaacactttttttgtagactcttaagaagtgatgtttctaaggcagtgaggccttatgggaacatatacataatccagtcctaaaaactagaaacaagctatctgtgataaccatttgtgatatgctgttttatgtcagagaatggtacctgtgttttgattcaacaactgtgagacactctttttgtataatctaagaagtgatgtcaccaaacctattgagttttataaaaaatatgaataaccctaaaaacgagaaacaagctatctgtcgaaaatgctttgtgatgtatttttttatatcaaataatggaaccagagttttgatgaaacagcttccaaacactctttctgtagaatctaagaagtgacatttccaagtcaattgagttcttacaaaaaaaatgcaaaatccagtcccaaaaaactagaaacaagctacctgtaaaaatgctttgggacatgcagttttatgtcacagaacggttcctgtgttgattcaacaagttcaaaacactcttgatgtagaatctaagaagtgctgtttccaaacctattgaacttttattaaaaaagtaaaaatatccatccccaaaaactagaaacaagttatctctgaagatgctttgtgacgtgatgttttatgtcacaaaatggaaactacgttttgatttagcaagttctaaacactttttctagaatataaaaagtgacatttctgagcttattgagctcttagacgaacatacaagtatccactcctaaaaatgagaagaaaaacctatctctgaaaatgcaatgttatgtgctattttacatcacagaatgaattttcaaacactctttctgtagaatctaagaagtgaaatttccaaacctgttaagcccttataggaacatatggatattcagtcttaaaaactagaaacaagctatatgtgaaaatgcattgtgaagtgctgttttatgtcacagactggtccctgtgttttgattcaccaaagttgaaacactcttttggtagaatgtaagaagtgatgtttccaaacctattgagcttctataagaaaatatgaatatccagccctaaaaactagaaataagatatctgtgaaaacactttgtgatgtgctgttttatgtcacagaatggaacctgtgttttgagttgacaagttccaaacactctttttgtagaatctaacaaagtgacatttccaatcttactgagcccttataggaagatgtgaatatccagtcctaaaaatgagaaaaaaagctatgaaattgcattgtgacatgttgctttatgtcacaaaatggaatctttgtttttattcaacactttcaaaactttttgtagaatgtaagaagtgacattttcaaacctattgagcccttataagaaaatgcaaatatttagtcataaatattagaagctctctgtgaaaatgctttgtgatgtgctgttttatatcacagaattgaacctgcattttgatgaaacagcttccactcacttttttatacaatctaaaaggtgacatttcctagcctcttgagcccttattggagcatatggatatcctgtcttaagaactagaaacaagctagctgagaacatgctttatgacatgctgttttatgtaacagaatggaacctgtgtttttagtcaacaagttccagacactctttttgtagaatcttaggaagtgacattttctatttttattgagcccttataataaaatattaatatttagtcctaaatattaggaaaaaacctacctgtgaaaacgctttgtgatgtggtttcatatcacagaattgaacctgtgttttgacaaagcaactttcaaacactgtagaatctaagaagtgacattactgagcctattgagcttttataggaacatacaaatatccagttccaaaaactagaaacaagctcttggtgaaaacgctttgtgacatgctgttttatgtcataaaaatggaacctgccttttgatgaaacagcttccaaacaggtttttttttagaatctaatagttgacatttctggccctattgagcccttatagaaacatatgaatatccagttctaaaaactagaagcaagccatctgtgaaaatgctttgtgatgtgctgctttttgtcacggaataatacatatgttttgattcaacaagttcaagacactctgtagaatctaaaaagtgaagtttttgaacctattgagacttgattaaaaaatacgaatattcagccctaaaagctagaagcaagcaatctgtgaaaacactttgtggtatgctgttgtatgttatggaatggaacctgcattttgatgaaacagcttccaaaacacttttttgtagaatctaagaagtgacattttggagcctattgaacccttacaggaaaatacgaatatccaatcctaaaaactacaaacaagctatctggtaaaacgctttctgatatgctgttttatgtctcagaatggtactggggtttcaattcagcaagtttgaaactttctttttatggaatctaaaaagtgacatttgagaacctattgagccgttataaaaaattcaaatattagccataaaaattagaaacaagctagctgtgaaaacgctttgtggtgtgctgttttatgtcaaagaataatacctgtgttttgatttggcaagttcaaagcacttttttttctagaacctacgtagtgacatttacaaatctgttgatcttttataagaaaatatgaatatccagccacaaaaactaggaaaaatctgtgaaaatactttgttatttgcattttatgtcacagaatgaaacctgtgttttgatgaaacaacttccaaaccctctttttgtaaaatctaacagtgacacttatgagcctatggagcccttatagaagcactcaaatacccagttttaaaactggaaactgtctcaaaaacactttgtgaggtgcttttttatgtcacagaatgaaacgtgtgttttgagttgaacaacacacaagtttccaacactcttgaatctaagaagtgacattttcaaacttgagcccttatagaaacatacaaatatccagtcctaaaaacaagcaaaggctatctgtgaaaatgctttgtgatatgctgctttgtgtcatggaatggaatctgtgttttgattcaagtttgaaacactctgtagaatctaacaagtgatgttttgaacctattgagtcattataagaaaatgcaaatatttagccataaaaatgagaaacaagctttttgtgaaaatcctttgtgatgtgttttctatcacagaattgaacctttgttttgttgaaatagtttctaaacatacttattgcagaatctatgaagttatatttctgagcatttgagcccttataggtacacatgaatatcagattctaaaaactagaaaggagctatctttgaaaactatttgtgatgtgctgttttatgtcacaaaatgataaccatgttttgattcaaaaagtttgaaacactctgtagaatctaagaagtgacatttctgagcctattgagcccttagtaaaaaaacaaacaaaaaacgaatatccactcctaaaaaccagaaaaaagctatctggtaaaatgctttgtgttgtgctgtttcatgtgacagaatggtgcctgtgttttgattaaacaagtttgaaacactttttttttgtagaatataagtagtgatgttttagaatgaattgagcccttataagaaaatgcaaatatttaaccataaaaataagaaacaaacaacctgtgaaatcactttgtgatatcctttttttatgtcacagaatggtacctgtgttttgatttaacaaatttgaaacacactttttgtagaatctgagatgtgacatttacaaaccaatcttaagccagttagatactctgatgagccagctgtgtgtgtatgtgtgtatgtgtgtgtgatctttgattattaaaactgaaaaaataatcgtatattcatgactagtagacacagtgttttaaaactgattctgaaagatttgagggttaggcttgttttaaaaacaattgcataggtcctggaaacaccaagaattagtggcttctcattcctagtcacatgaaaaatattttactactcttgtgaatggccataaataatatgcagaattttttctgtgtcctaaccttttatataattggttctacagtgtacatcactgtgtgcaactttgttttgtgtgctcagacttacattttccagttttctccactttgatacaattggtctgtgtttcatacattttgtattttctatagcgttcctttatatgactctaccacattttattgagtctcctcatgctgacaggtaagtagatgaattaataaatgaatgaataaataaaaatgagagcaaatttcaaacaggtgattaatttagtgattgtaaccatggactcagcaggttagaaataaaaactgaaagatttagaatgcaagcaggcacatcataccttctaatagccattggaactatgacccacaaaccattagcctagaatgatgggacatatcttgtctctaaaaaaaggtcactgttcagttctcaaagaatggatataaaaatggcagataccattccacattattctacttcctttaacctctacgcataaaacttgagctgcagggaatgttacctcctgttcttaaaaagacttgtagttcagtgaggaactcactcctttcttcattcatgtgttcaaataatatagggaaatgaatggaaaagtgaagagaagttgaagactattatggggatagcacaggattagtcagcctcatggtattattgatctgccttattccacaaatatttaccaagcacctgctacatgcaatttgtatactaggtgctggggatacaggagataacaaagtccctgctgtcaatgaaaggggtcagtcctttgattcatctttagttaattttaagcacacaacaactatctcaaactttcttcacactttccaagctcccgatccttcatgcactcttggtagatgcctgaccttacctcttaccttactagaacctaagaccacctggtataaaatcccttaagcacactcagatttgcgtgattttacaatgatgtctgttcccaaagcatcctcacttctcttggagctgagggtgaagagctcctctttcttcccatccgtgatcttggaacatgtacgactacacttgtgacagtaaatgcttaatacaggcagaaggtttgttccttatttcctccctggggcctccctccagtgaatatctcttctagcattgtcagttgtatccaacagaaaagcagagatctctccattggtccaaaaacctaagatggactctcactgctaaacttctcaaatgaaaattcctccactttagtcctgattaccactcaaacactgttagactgggcaggtcactacccctgcctagttctgtttccccatctacataacagagaaataattgcgccttatctatcctacagaagtgtgaagaggtttgatgtgacagcagtgaaagcaatttaaaaagcacagagtgctatacataagaagacattttcataattattccgctctaacatgatatctgtattcatacgatctcaaagtacttacccaagcatggattctaactcttgtgtatgtaagcaaaggtgtaagtctgtcaccctccatgcaaatagaatctcccctcccttggcccctgcatctcaccatatacaggaattaactcaagatgaatcaaagttttaaatgcaagaccgcaaactatgaaaatcctttaagataacctaggccatacccttcttgacaaaggctttggcaaagcatgtgtatgtctaagtccctaaaagcaatagaaataaaaacaattattgacaagtgagacctaatacatgaaagagtggctgcacagtagaagatattaccaacagagtaaacagacagccttcacaatggaagcaaatgttcccaaactacatctgacaaaggtctaatatgtacgatctaccttaagtccttaaatcagatcaaaaagtccaattaatggttagagacatgaatacacactgctgaaaagatgtaacagccaccagtaaacatgaaaacatgctcaacctcgttaatagagaaatgcaaatcaaaagcacactggtcaaaatggtgattataacacagtccacaagaacagataccagcaggacagaggagggcactggggcaattgatcatgattcttatggatagtcatttagtgttattaatgaatttcataacaaaatgatcaccatacaaaaaatacaaaatgtgttttcttccctgagaaaggaaaataaaaacttggaatgccgattcactatgccaaaaggaaaagttaagctgaaagctgagtcatgcaagaaactgcctttctttttttttcctgagcagacagctactgataaatagttaaatttctccacaggtagctactctatgttcatctcatcttacttaaagtgctgatttactgagcaggagaaaaatatataactgactattcctttacctgtttgttttctcttgcaacatgtggattcagcaacgtgaccatactctccctcttttccccgcagcctgcttttctcttctaaacactgaaaccctaaaatatttttggagaaaggcacagacctctgtcgcccagccatgtctttaaccttggaagaagaaacttctaaattgataagagatctgtctcagacactttttcgtttacatcccgttatctcagaaagcaaaacaggctttgttccaacccaaagtaatttgtgaatattcaagcggtatcattctgatgtaaaatttacataaattcttgggtttaccaaaatgcaaatgggcaagcagatcactatttacagataatggcctaaaaaatggtaagagtaaatgctgtggagctaaatgtttctgagtctgccatttcctagttttgtagtttctctcgggcaagttacccaaagttgctgtatgttattatcttgacatttaaaatagaagtaataactttattataaataatagttaataccatagggtcattaggaaagtgtctggcatatatagtcacaacccagtgaatgccattattgtttttgctattatcagtataataattgatactaattttgatgctgaggtaaaataatatctggcagcttttaatttgctaatgttaaataactgaaaatagctttaaaaagtgaaaatatccaaatcaatgacaatatttgatttatataaaataagcttcattttttttagtttttttgctcctaattattacttcactcatcacactgatatctgagcactttttaaaacatatccacccttctcagttgtactacttattcccttttcttgtaatcccagccttcaaagatcctttctcatttttctaactcatttcacgactccctcaccttgacccccagttatatctctcttgaagtcaattccattgaattgactacttggcccaaacttcaccccaactcagtctctcttcaggaaggaaagtccccacacaaaaaggaatgtgtctttcaactcatgcgccctttttgaagaagctttccagacagcttccttacagtgatctccgttatccatcctttagatcgctgtggagtcctacaggggcgcaatgtggacagtcattcaaatgaagcacacctaagtgcttgcattttctaaaggcccattgattcatgtaactcccgtacttgcacagataagatgttcctgcctgaatgcagcagatggaaatgaaaattgtattctctgtcaaggctgattgtattacagcttaatgatttgcattttaaaacttggaagttctcataaatattaaagtgaaagaacaattggctacattattaggtaggttcggctgttcgtataacctggtgctaactatctaacctgcctgagtgagcctcagtcttcattactgcagcatttgtaagatatcaatgcctgcttgaactcatgtcttactaagattatggccaggattgagtaacatatggatataaaagcacttgacaaatcagagtatttcataaatgtaataataatatgctacatttataacatctatactcttttcctgtgtctatcttcatttaaaccttgcagtttctatcataatcaaagattttgtaatcaggttacaatgagtaggatttaacccataagcaattttcaaatttcctagatatgttttcagttttcacatttatgttggtgacaaaattctgttttcagttttggtgtttgcatcttctaaaacagtgtcttgggtacttgctctttgatgagacactgtgcagacataaagagtgtaagaaaacagaacagtttatctcagctttttgtggtctagataacctgcacactgctttcttggctcactgcaacctcctcttcctgggttcaagtgattctcctgccttggcctcccgagtagctgagactacaggcatgtgccaccacgcccagctaatttttgtatttttagtagagatggggtttcaccatgttggcccggatggtctcgatctcttgaccttgtgatccccctgccttggcctcccaaagtgctgggattacaggtgtgagccaccgtgcccggcctgcacactgctttttaataagctgatctgtcttcttgtttacataggctgtgctatagtcatttaaagttcaaaattactgctaaaaagtaattaatcctttactgaaatattcctgctatttcatgagctgtcttacaatttggaggaatctatttgtcactgatgtttaaaaaagaaagtcacagcagggaggctttagcttcattgaggaacattattataaaataaaatgatcgagggtaatttttttttgtccttgtggtactgtttctgcagatctacattaatctgagcatttaaagtaataataaatttgttatatcctctttattattcacttcaccatggtagcccctagtggtaaaaggagatgtaaattgctcagtgctcacattgcagggaattttttcctcagttgaataaaaaggagttaagcctctttggaaatgagggctatagcctgtcaataactacatatattcctgtttttaagaaatcagaattctggtgtccagtaaatgtagatgccagcattattaaaaagtgattgagcagagaaatgaattgaatttttgacccactctggcttccagctttcatgggagcctatacagggggatgatgaagagggatataagagaataaatgattgctctattaatctactttaattgatactaaaatctgacagcgaattacaagttccaggcagtaaggcttaccaattcattggtaatttcaaggttctactttgctttctttttgccttcagctccttgcaaaggacacctttttttttttttttttttttgagatggagtattgctcttgttgcccaaattggagtgtaatggcccttaacatccgcctcctgggttcaaatgattctcctgcctcagcctcctaagaagctgggattacaggcatacatcaccacgcctggctaattttgtatttttagtagagatggggtttctctatgttggtcaggctggtcttgaactcctgaccccaggtgatttgcctgcctcagcatcccccgcccaaagtgctgggattacaggtaggagccaccacacctggccaaggacagccttttatagttcagtttctcagtttatctttgactattcttaattaagcttgacctggttctccaccactgacgctattggagttgcaaagcattttgctgttataatgatagctcccttgatggctgttcattattaactggttttcaaaagtgctgcttttaactttcattttataaatatttaactcaatttttataaaatgtgcatagactatagaggttctgcttacctgtttaatacagtaaaaaaatcccttttgtaatcttatataatattaagaatgtgtccttaattcatgcttaacataaattcttacacaactagcagtatctcaaaaaataaatgatttaatagtttatgacccttatacatataattaattgtagtaaaatatcttagaaaatagaatgagtattttttataaagataaaaaatcctgatttttttttctggtcttaatataaaattaaatgtgttaaagggaacttataaattacatagtagttcattgctcaggaaaagaaatgacaaagtaattaagagtgtaaaattaaaaggattaatttttcttaaaggccgatgagttaacaacacgcatcaatctctcttccttctccaaacttcagacaaatgatggcaaagtaatttttaagaagtcaatttatagaggcaaaaaacctgaagtacagagagtaggaaagacagtaatagaattgagagcagttgacatccataacattcctattattacctccattttctggataagaatatggagaagaggaatcgttaagcaatttgctgattgtcacatattcagtaagtggcaaagttagtattgaaacccaagtagtcttgttttaaagtcatacactcaatcactgtgccataattcaataaattgtgaaggatgggaagcagatggagaagtgattgatgaagcaggactgagaaagtgctgcctatgtgcccacagtgtgaagaccctacaagacatcagaacatcatccagtgaagctgtgagcagctcaccacttggaaaaactgagtgttttggaaggcagggataaagtgcagttctgaaaagagaaaaatccatcaagttctaaacggtcgcgctctcttaccccacagtgggcaatggtctctccattcatcattttcttttccctgagtcccttgaatcttaaatatactattctgtgaattaaacatggtaaacattagactttgaccagcgctattatcagaagttcacatacctaatcaaaggacctgtaaccttcttcccctccttagtttctacaccaccagtagccaattatactatcccagctcccatcctaaaatccccttctaaaatagaaggcaaaagatcatcagtcatttgagcaaaatttcagcatgacagcatgagtagttgagacctatagtaacaactaaaatggactgggataaaacaaataatgtttggaatcaaagaacaggaaaaatacaaccgatattggagcaagaaaaaataaaaaagaatatgaaaaatagataagaaatagctattggaaaggtacaagaaatacaattttaaaaccagtggaacataagacaaaccacaaaatgagaaaattctattaataaaaggtcgggggtcggggaactgtattctttttttttttttttttttttttaagacagagtttcgttcttgttgcccaggctggagttgcaatggcgcaatctcggctcactgggcaacctccaccttctgggtttaagctattctcctgcctcagcctcccaaatagctgggattacaggcatgcgccaccacgcctggctaatttttgtatttttagtagagattgggtttcaccatgttgatcaggctggatggtcttgaacccctgacctcgggtgatcccaaagtgcagggattatgggtgtgagccaccgtgcccggccactgtatcttttaaaaatgtaattgtcatggaaggcaagaaaggtttaggaggctttccatattgaagaggactgaggagacatggcaactaattgcaatacatgattctagactgcatgcaatactggaggaaaatcatgctataaagaattgactcaattgataaaatcagaatactagcagtagattacatcaaagtatcgtatcaatgttacatttactgaatctgactaccatactatagttaagtaagagaatattcctatttttaggaaatacagaagtgtttagaggtaaagggtcatgatatatacaacttaacaaaagacttagacaaatatggggtatttaaataaaggagaatgacgtgcaatctgagaacaagaagtccaacagagaaaagcaaaaatagggagtcagcgagcaaccagtgagatgggagcagaaggatggaagggtggaggagtgacatctaaacatattaagaactcaaatatgttgattattttgtatatctgaagtttgaaattatcactgacaatcttctaaacttcaggaaaaatgaggatactgtgctacaaatgtaaacttaagaacaatatttacatagtcatcataatgtaattatgaaatactgatttcaccaaaaccaatttgatttaacacatcgagagaacagtgggaatagagtcctgtaattggtgcacctgtcctaattcctatgtaggtattataatagaaagttaataggtaatgtttaaaattgataaatcaagataacaatatcagcatgttaggttaaaaacaaggtaattaccaaaagcaccagataaaagagccaaacattgctttctctattgaacgggactacagcatagagaagtgttaagcaagctgccattattcttttgctcttattataagcctcttaatactatttgattactagctcatgagctcctatttataaaaataaaagcaaattttcgaagtcagaacaattcatgctgctacaaaatccctaaagtcatttcaacaatacagcacactgatgattatatagacatttttcttgtctgagttctttgtctagaaactttttaaaagaaacgtggtcctgtattacatgtagcatgctttggaagaaaaactatctccaatcaaaaagtttttaaaagagcccagatgttatcgtcctttgtatctctaaaagcaattgcttttataaaattaggatctactcttttttgaaatttgaatgctgaagttttgtgggtttcagcaaaagataggcataacatacatctctacattttattaaatatgatggtgcagatgttaaaaatatgtttgaaatgcagtaccttctgttcttgctttcaactcctaccctagagtaaatgaaatgctaatcacctcttgtgttagtgatagaatttgtgagtttccacagataaaatatgtttactgtaatttccaaatagttgatagccagtagcaatatcttgacttcagcaactggtatgtaagggtctatattaaagtgtttatattatgactagtataacagatggtattatttgttacagcaggtcataacactaaaaaataaaactattacacatctacaatttgatcacaaattttagtggcagtgatcacttattttatgaaagagaggcagtaattgccgaagtactgcctaaaaatgtaagacaattctcattacagggtaaggtaaaattattgacttattaaccagaaattcacatctatcccgctacaggaaaaaaagtgtacatttaatatctactacagtcagttgagttttcaaagtaatctgtcatctctaccatgaatatggggaacaggagaataactgctggatttttggcatttgacacctaatatatagaactttaaaggaggttatctattatataaataatctttgaagaagagcaatttatgtttttggacaaccaaaaaattacttgtttagcttcacaggaattttaaagcatgttttcacttattattaaacagtaacattgaatatactgctcttttatcagttctcatttttttcaacattcagtagatgactttaaagaactctcaccttcctggttttctttctaaactgagattatttcttctctcacttatgcacctattttctaatggccatgtctcaaaaaatttttattctagcgtcttttttccttttatcttggttttgctgtagtgctagatagatggttacttgtgagactttcaaatctatataccaggctccaacttctctccctctccctctctttttgagtaagggtttggctccatcacccaggctggaaggtcatggctgattgcagctttggactcctgggctcaagggatcctcccacctcagcttcctgattagctgggactccaggtgtacagcatcatgactagcaattccattgtttttagaaatggggtcttgctctgtcgaccaggctggtctagaactcccagcctcaagcaatcctcctgcctcagcctcctaacgtgctaagattacaggcgtgagccaccacacctggccaacttctaagtttcagtgctgtagttttaaattgtttctcatacttatctaatattttttcccaccatgtcaaacccttaaaaactcagtatggacaaaataaatattaacttttttgagattgataattgtatgatagtgcttattacctcaaaagaattactggggcagcagtataatccagtagatgggggaaatagtggatattaagaccgaaatgggatcataactttttagttgtatttgcccacattaattgttttaaagggggtaaaggcctggaatatgaaaacaggaggatataaaatatatggaggttgtgaaagatgactcagaacttgaaacaattgtttcactgcagtaaatacatgttgaatgcatagaacagagaaaaacagaagaaaagaagaaggaaaaacaaactccatgatttaaaatattgatgaatgtgacaataattgtatctttaaaataactgagaaatggtagaaataaaaattataagcttcaactgtatattacttattcttgacaaagatgatagttgcaagctgaagccaaaatttctaactaggactaatgcaaagatttcaagagaaactttaataaagaattattgatgcaagcgctttcagaaagcaaaggtagggactaaccattagctcttgtttagaaagataaaggtcacaaataaaatttgtgttttaatctatacattttcagcattatgtcatcataaatttgcatgttgtttattacaaatgggaaaaggtttcctgtaatatatcaagatgagttttaatagtttcaaggaccattgatttgtaaacttaagactattatagtgttgtggaaaattaaatataattggtgttttaggaaaagttgttcattgaagtttccattttatgtgccttaacagattaattttgcttattaattctgtgatatttaagcactgctgtaagcttcacagatttggcaatagccactatatacttaatgagtacaaactatggagtatttccatattaaggtagaagaaatatttaaaagcacttctacttgtgatgtcattgggggtgcaacacaatataaagtacgcacattgctggaggagaagcataaaataaagaactcacggggcagaaacttaagacacacctaaatcaaatctttgttttcagcattatctttcattactattctttgttacaaaaaaacattgctatctgtccttttctatatgttctctacattaaaacttattatttgtatacatactgttccctacatctgcagtgccattcccagctcacatatctgccctcttaaatttatatcaaattcaactcccttcaaaaagccttctcagttgctttaacccaagccagtagtctgtcttctagaaaacagttgatgccgatgcctccttttcctttagcaactgaaaataatattatagttatttaatgtgtgtgtgtgtgtgtgtgtgtgcataacatcatactatttagtagtatctatatctatcaagtatctgctacagtggatgatagatgacttaaagacagaaatatgttattcatatctacttctcacaggtctagtgctgttgcaggatattttttaaggaatcagagagactgatggggttcaggaggatatttattatttaggtgcaccagcccagtcggattaacatccaaaggactgagccctgaacaaagagttaagttaccttttaagcattttgtagggtgggaggagatctgtgcagggggaagcatgttagagaagtgagaaacaaagacagttattcaattaattgagaaatgcgttacatcatttcttacttttcaaggaaaaacatgttttgcgacttttgtttatgtgtctagtgactttgcagctgcccagctagggaatcagggtcttcacaatgcctgggaatggaggggagagaaagctcattagccacagaaaaataggccgttagttttttaaaggactctagctctttctctttctcagggggaattggattttcttacatacaactgaggttctgcttacacattctttaatttcttttaattcctgttccagtgcagtgcaatgttcatagtagatgcttaatattttttgaattattgtatctttagtcattgcgagccatcattttgagagtcagtctcattcttttagccctagattatttttattttcttgagatacgtgaataaagggcacaggaaaaaaacacagttgagagttttggataatagtaacctaattcacccagattttacttcatattggttggaactctaagttgggtgcaactaacatgagacttgttttgatttattgtaaacatattcttgaatgactaatgaacagtgcttcatgtgaacaaattttcaccttctgataatttccaatattacactttgaaaaacattcccattgtagtgctctagaaaatataatttcaattgttaaaattcaatattactgtaattgaggatattaaataacttgttgttacatgatgctagctgcagcttaaatttcagatcatgagtgttgttaatattatatagttggaattagttctgagatcaatgaatcaatgctgtcttactgttttgtctttaatttttataccacatttattttgtgagtggatttcataaaaggaagttgctttatgttgccaagctcattatcttgggtttttgtccagagctgaattccctttttcatcaaaggacagagagagcccattataaactattgagtaatgctgatttgatgggtaggccacttacctttaagtggaaaggaggccaggcgcggtggctcacgcctgtaatcccagcactttgggatgctgaggagggcggatcatgaggtcaggagatcgagaccagtctggccaacttggagaaaccctgtctctactaaaaatacaaaaattagccgggcgtggtggcgggtgcctgtagtcccagctactcgggaggccgaggcaggagaatggcgtgaacctgggaggcggagcttgcaatgagtcaagatcacaccgctgaactccagcctgggtgacagagcgagactccttctcaaaaaaaaattacacaaaaatgttagactaataaatattaataaacactaaaggaagaaatttagtggaacatttatcagaggcaacagaccaggaagttatagttaccctgtgaaaaggcatcatctaggattcatagaaaacatttgcaaattggcaacaaccaccaccacaacaaactaaaacaaatgaaagaaatagacatttatacagggaaaatataaatagataataagtgtaataaattttgtgactttccacttgaaaacaaagaaatggaaataaaacctatgtaaagaagtggtggagtgagccgagctggggtgggaggggtgggggcatcccaggcagagggaacagcagatgcaaaggtctggaggctggagcaggctgtgaggggtgagagcagcaagtacatgaagtctagaccacaaatcgatgcttcaccctcaaaaatagcctctcactggccaccactcaggcccagatacatgtgtaaggtgggcagccttcaggaaaagtgaccgcaaaagtgcaccacattgggaattctgaggtgtttgagaaagttatggatgaagggtgaggtagactctagtggggaatgtcctcttgccacttggacttctctgtctatttcatgggctattatcaacttctaaagagccagtggtttgggtgcacatttaggtgtaagtacctcttgcctcaagccttaactctctttccaatgagtcaagtgagctgttgtgtttaagtaacttctctttattgtgaaatctttcctatcactttaagaaccttcttcttcagacccaagtaatcccaaggcacctataatgtccctcctggagaagacaaaagggtgtcttctatttctgtgtggcccgatatttcagggcccctaaccaggttagttcaaggtgctcagcataaccatgaatctgctacccatgtttctcaggtgggtcataggccctggagggattgtggctgtggaccaagcagggggtgctgtgggctgttctgagaaggagggttttggagtgtccaagctgagaacatagaggccccagatgttgtatgagtaaattttcatctgacagaattatattttcctaactgaaaacatgaaacagagatgtaacaactgtgcctctttggctctgtctttgcatgctgtcatcagccactgaacaggagctgagagggaagacataaagaacagaaaacccatgagggggatggtccatgtgggtgtggaagtgagggtgagtggggatttggccaaagaggcctaatccacaggagtagagtctcatgtgtgactttcagaatgagcaggagtgagataggtggagggggagtgttggaacatctcatcagaggtgagaatccatagaaggagacactggtcattacagtcagtgagaaaagtgactttagcctgagcctaaggtcattggatcaaggaaggggccaggaggagctccttgaagggaagctgtgagcttgagaggcaggctgaggcagatcagtagaatgagcccccgagaagggctcacagagtcactgaaggactgtgaggtggcagggacaagctcacatggcctttggtcagtgagtctccagctgtaatgagaatgaaatggggaagatctgggacaggaagacaagctgggggcgctggtaccatcatggggagatgatggtgggtggctctaggttagttagagttggaatgaagagcagaaagcagcttcgtgatacctttatgtcataaaatacatttggcatggagaggacttggactttgtgcatgaaggatatggatgtttctaggctgactcccaaatgtttctaggctgactcccagaaactaggatgtttctaggctgttcctggctgagaatttggatggtaactatagtccaaagaaacaaagaacactgaaatcatatcttattttttttaactcacaaaatagaggcaggtagatatttatatgtgttttgttggctcaatgattttttttagtaataaacatatttacttagaaactactgggtgtctgtatgctctgggatttttttctcctgtcctgatgacatctctttcctttctctgggttcaggagttacttcccaggttgtggtgacacaggaacattcactttccacaactcctggaggggcagtcaccttcacctatggctccaaaattggggctgtcatcagagcatctcgacagctgggcccaacagaacatctggcaatgtccccagggcaatggtgggcacaagcagtcaggtcctgggacccctgcacaatcccctggttctcttcatgaagaaaaagccactctggttataatgaggactagaccaagaatgaggcccagtgttacatgctcggtgtggtgatctgaaatatcaccacagggacaaatacaaaaatacaagtgggaaactacactcaaacccttggatcaagcctcagtcctatgcttctgaagcaaatttcttgtttttggagtctggttttcaaccactgtagactcagatcatttattcttcaggcccccaatgggatcatcacaagcactttttctatcaatcatggcagtcacttgagatcaaaggtgaatttcttcttcctcaagttataagcaacactttggcatatttggtgaacttcaaagaaaatggctaagatagaggatgagagacataagaggcttcaggaatatttcagcagatgcaaagcagactacagggtaactcatttcccatatgatttgattgattgcaaaatgtgaaattaaatgcatacaaaggggaatgtgtgtcatttttcctcttaatgacaaagtaaaaaaaaagcaataaaacaaaaacaagcactatttcatgtgtcttgataaacttgtagaaagtcttataatatccacaatatctaggatacagtaaaataactttccatatgaagaaccagaagaacacaacttaaatgagaaaagacaattgatagacaccaatactgaaataatttaggtgctgatgttatgtaactgagattaattaaggagtaattatacaattccttcagtgagcaattttagacattattttttgaagttttaggttcaggggttcatgtgcaggtatgttacgtaggtaaacttgtgtcagaggggacattcttgaaacaagtggaaaagaagcaaatcccgaaaagaaaaataagtcatagaaacaaaccaaattaaaattagaaaacagaaaaatgcaataaattaaaaagaacagtctggagggactctggaacaggtaacagtgaaattaaagttcaggcattagaggaattatttaccgttaagtagggaagaaagtacaaacaatagccatctaagcccagcagagggagctgtggatcttctcagaggtgagcaaggccggaaatgaactcccggggctctcatttatggctcctgggtccatactcactggcccgaattggggtttagagcaggtgctttctcccaaagggcaaactcagagttcccagcagcccatcctccctgacagagcggctgctgcctggctgagcactcagaacttagggagccggtggttttggtagaggccccatgtttgcataatgtcctaaccaaacacacatctacccggggaggtgacgaggagttagaggaactgtcccagggtccagaagtagccgggggttctggggatccttggaaagtccacaccatagcttggatgtctatcctcccctctctccctcctcactgcccaggttcatgtagatttcaaagacaggactttggagggatctgtctgctgtgattcctcacacataacatgtatctgttttagtttcttggttcagttctcaggctgtggtgactcaggagccctcactgactgtgtcctaaagagagagacttattctcatgtgtggcttcagcaccacagcactgaattcagcagaagcctggtcaagtcctcaggacattgatgtgtaacacagataacaaacacccctggatgcccacttgattctctggctccctcctgggggaaagctgccctgacccctcaaggggcccagcctgaggatgaggctgagtatactgtgggctacaccacagtggtccttagcacagtgagagacccagatggggaagcaggacatgaacgagcttttggctgatccggggtacaaacatgaacgtaggatatcaggatcacgtggccagacacctgagctctcaaggacacctaaattttaactatccgtagagagaaaggtgggtggagaggtgtaaattgattcctgtatctgtttgaattttaaagtggaaaatatttgtgaatcatttgggagatgcagattcccaaaaagaagaatttatgtttatattccaaacagaacagtaatagtgagatcaactctaaagactaaggtcaaacacacttcatccagaaagatggatctcaaaagattttgttgttgttttgcctattaaaagctaagagaggaaattatattaataaagtttatttcatgttctatgttaatagtgtgtatttcatagctttttaagcattaaaaattataaaagtgttaagagggattctcttctctaatgttatataagaaagtatccacctaggaaaatattttgaaggtctaacccccagtacttctaaatgtgaccttatttttaaaatagtgttattgcttatgtaattcttaggatgaagccatcctagagcgaggtggcctcttgatccaatgtgcctggtgtccttataagatgatggtagtaaggagattggaagacacagagagaatgccgtgtgacgacgaaggcagagattgaatttacacagctgcaagataaggagcactaaagattgctggcaaaccaccagcagccagaaagagggaaggaaggatctcccctcaggtatatatggaaacattgccctttctatgaattttgggaggctagcctccagaactgtgagacaatacatttgtgttatcttaaccaaacttgtgtttaatacattctgacagcagttctaggaaaccaatacaccagacaataaattacacaatacttctgaaattgattgtacttctttcattttggcaaccagtttttccatgaatatgattatatctgtgctcatatttctaactttataaatatgcttgtaatttaaggttaagataagaaatccttgtgtcttaaaaatccctaaatatatgagaactgaataataatattaacattatgagatctaatggaaaattgtagcttttacataattccacttgttcactagtatcaagatgtgaaggtgggaagatcaccttgttattaacaaaacactcctggtcatctctgtggatttgagagtgcagggggagacacctacatattgtttgggaagtcacaaatgcagcatgcccagagcatcatgtacaacagtgtgagtttgctggacatgtgggcaggaagcagaacagactggggcatgaggaaccacctatcaccaaacccaccagcgccttcctccctggatcagcccagagctgctcagacttgaatgtgcacatggatcatgtgggatcctggataatgtggattctgatcagtgggtctggactgtggactgaaattctgcgtttctagaaggccccttcttccaaagatccacatacatgttttaatattaccatattcataagaatggtgggaaataagggaagccactttcagacagaaaccaaatagaaatttatctgagagggagctaaaggattatgatcaaagagaaatccccaattccaggcagggagctgatcacagagggcagatgggaagttgggagaggttctatttttttttttttaagaaatagaaatgaatgcaaacacaactcaaacctcctcttgatccaacatccctgctggctcctgcccaatttctgcactggcttcttctccagtcttttcccaagcatggaccctcctcaccctctctgcttccccatctcaaactcacaacttcccttctcagttctcctgtttctctccctttcattccacttccttcttctctgtgacctccttagacaatcaccaaaatatttctagaagaaaagccatgggtatttttcatcttttcttgaaagttgtcactcacattccctcttcgttcttcagcctctcttaccccttactacaaaagatgcctgaggccactgtttctcttttccatcccctcaaatagcttctccttccaacccgtttctctcctcagttactagagcattcagtgaagcactcagtcaggttaaaggatcctcccaaatgctcaccctgctctctatgtgtgatctcctgaagaatcaagtagggagagaaacatggcttcatgagtttgtggggaagtgggtgcatggctgaactgtccttgttctcagcaaatgtactttatttcatgcacagtttgtatatgagacaaccttctcctgcggactccttataaaatgggaagaattatgtgttgtgttttcacagaggaagcccaaatattccatgctcatgggtaggaagaatcaatatcatgaaaatggccatactgcccaaggtaatttatagattcaatgccatccccatcaagctaccaatgactttcttcacagaattggaaaaaactattttaaagttcatatggaaccaaaaaagagcccgcatcgccaagtcaatcctaagccaaaagaacaaagctggaggcatcacactacctgacttcaaactatactacaaggctacagtaaccaaaacagtatggtactggtaccaaaacagagatatagatcaatggaacagaacagagccctcagaaataacgccgcatatctacaactatctgatctttgacaaacctgagaaaaacaagcaatggggaaaggattccctatttaataaatggtgctgggaaaactggctagccatatgtagaaagctgaaactggatcccttccttacaccttatacaaaaatcaattcaagatggattaaagacttaaatgttagacctaaaaccataaaaaccctaagaagaaaacctaggcattaccattcaggacataggcatgggcaaggacttcacgtctaaaacaccaaaagcaatggcaacaaaagccaaaattgacaaatgggatctgattaaactaaagagcttctgcacagcaaaagaaactaccatcagagtgaacaggcaacctacaaaatgggagaaaattttcacaacctactcatctgacaaaggggctaatatccagaatctacaatgaactcaaacaaatttacaagaaaaaaacaaaaaaccccatcaaaaagtgggcgaaggacatgaacagacacttctcagaagaaggcatttatgcagccaaaaaacatacgaaaaaatgctcaccatcactggccatcagagaaatgcaaatcaaaaccacaatgagataccatctcacaccagttagaatggcaatcactaaaaagtcaggaaacaacaggtgctggagaggatgtggagaaataggaacacttttacactgttggtgggactgtaaactagttcaaccattgtggaagtcagtgtggcgattcttcagggagctagaactagaaataccatttgacccagccattccattactgggtatatacccaaaggactataaatcatgctgctataaagacacatgcacacgtatgtttattgtggcactattcacaatagcaaagacttggaaccaacccaaatgtccaacaatgatagactggattaagaaaacgtggcacatatacaccatggaatactatgcagccataaaaaaggatgagttcatgtcctttgtagggacatggatgaaattggaaattatcattctcagtaaactattgcaagaacaaaaaaccaaacaccgcatattctcactcataggtgggaattgaacaatgagaaaacatggacacaggaaggggaacatcacactctggggactgttgtgtggtggggggaggggggagggatagcattgggagatatacctaatgctagatgatgagttagcgggtgcagcacactagcatggcacatgtatacatatgtaactaacctgcacattgtgcacatgtaccctaaaacttaaagtataataataattaaaaaaaaaaaaagagagttaaaggctgagatgaggtaggaggctgccctgaggaagggtctcatcctctggcatctggtcacagacacgatgggcctgggcctgggctgcagagagcacaatggggctgctggtgggggctctgtgcggctctcagctgggaaataaagtccatgaactttgttttgcctcacggctcactggggccagcagctgggtcctctctgggtgcttggggagcttcaggccaagctcagcccaggctgactcctcctagtagtgtcacccagccacagaggctgtacacaggcccagggagagttaggttaagcaggggaagaggagcacatttgcatgaagggcccctccctctcctttgaggctagagggtggataagagagacctgcagcgtggctgcctcagcagagctctggggagtctgcaccatggcctggaccccactcctcctcctcttccctctcctcctccactgcacaggtcaggaggaccctcagcatcctcatgccccagctcactgacaccatctcccaaactcataccagaaatgttgtttgctcttgtccttccttcaggccataatgagcgtctctgttttcagggtctctctcccagcctgtgctgactcaatcatcctctgcctctgcttccctgggatcctcggtcaagctcacctgcactctgagcagtgggcacagtagctacatcatcgcatggcatcagcagcagccagggaaggcccctcggtacttgatgaagcttgaaggtagtggaagctacaacaaggggagcggagttcctgatcgcttctcaggctccagctctggggctgaccgctacctcaccatctccaacctccagtttgaggatgaggctgattattactgtgagacctgggacagtaacactcacacagtgatacaggcagatgaggaagtgggacaaaatcctcaacctgctgaggctattgttcagtgacaatttttaattttaaaacattttctgtatgtaaaaaatctatctggatgcatcctctgatttagaacaattttactcacaatttcccatttaatgtttcagaagtctcagaagaaattaaaacataaacaagaacataagcctcctgatgacactgagatgtctgcttatccttatgggctgataccaaagtctgtgaagctcaccttttctcttgaaagaaaaaaagaatgagccttcccttgagcaaatcttgctcagagcccaaacttcaagcccacaaatggacagtcccctgcagcatgggctcttgttcttcaaggggtcaatgaggagacctccctttcccaccccaggtgtctgtagtcagggctgcctgatgttccctgcatcctgggactaggcactcaggtgtgtaataccccagaggacaggcctgggagtaattccaaacacagagctggcctgattcactttcaggttcctttattttaagttaaaatgtcaggatagaaagaagttgggtatggggttattcatgaaactgaggccagaagatgtctttgtgggctgtgagagggtgacatggtggctccaccattgctaggggaatgttgagtgagctcctaagaagtttggggaaatcggtcttgtgagtgtggcttcccttcagctcattccactcagaaacatgaggacacccatgggtggatttttctgaactcacaaacactgacttgtgtcctcttttttcttatcccattggagatattcagtaatctactctgtgagatggggtctacaggagatcatggagaagaaactcttcaacctgtgcaagtgaaacttccttgtgtgaagctcttgatgtgtccagattccaaggtcaccttctcctgcacaggggtcagcagaaacattgaatattaccatggaaactggcccaatggctccagagaaatcctgaatttgtgactgagaactgcagtaatcaaccttcagggatctcagcctgattctcctttttcaacttgactttccttgactgtgcagcccgagggtcaggatgactatcactgtcagagctgaatacaacccgatgctgccatgagctcccattccatggggaagtgacataaacatctgtcctccatttcccccatcaaatccgtcactgccctgtccctgcctgtgaccgacacctgctcaggttgtggattctgctgtcacttgtgattccagcaagtctgatgcttttaacttggtgcatcattattagggaagccactccctctaaatcctcagaagatgcccccaaggagttcccggatcccaaggtgcaggatcaacctcccagtaaggaaggctctctgggccccatcactgttcatctgttctactttaatcctaagaaccttgagccttcattatttcccctttctgcttatttggctggaacgttgctggaatgcatctcagttctttggggactagagggataaaaagcacagcccatagaaagctttcacctggttaagtagcatttcctaagagccacgagggcatctgctcactgctcactgctcatccttgcatcataatgggttcctggaccctgggctctcctggctcattgagtttaccaatccctccacactccactcattgctagggctggctagagggaaggatagtaattgtccaatagggagatagttttaggggggattacagaaactactccccataatctttgttgataacatcttcatcttgatgtttgctccccaggatctgattgtgacagtggaagtctgacacttgaagaaatgtaggtttacccttctgaaaggcctggccctggcttggcctagggctggaaggaagaggtgctgagctttgggcaaccaaggcacagctgtcaaggggctgagctctctgcaatgtgggcctcctgcagagacatccctagggaggctgagacctgacgatgatgcagaaaagcaaattgaagtgagcaggggatggtctgtgggggaatcagatgacaggtggggggccagatgtgatacagatggtgcaacatgaagaaaagtgtcttttgtgattgttctgaggagaagggctcagtgctagagcagtgataatgaggcaggagctgggtcctgaagccacaggggaaccaggtcttgggtctttttctgagggtccctagggaagatcacatgacaaccaagtcccatgttatatgtccagtgctcggtatcccagatgctgtccctcccagagcctctgggtgtcctcgtcccactcttccctgtgatctgttttcagctccaggagcaggttcatactctgtgccaagagtggggcttgcatggctgagtggagaacagatttgcaagaagatcccaccttgcagtctggctctgtgtcctgggtgtgggtggtaactgaggagatgtaggcatttgggctccactagagaccacagggagcagagctcacaggggctccccacaacccgggctcctcccttcatcctcctcccattgccttcctcactggggttcgggccaggggagaacccagggctgcttcaagggccctgctctgcaaccatggtctttatccaagtcattgtctccaaactctgtaagggctttctctgaaactgtaggagcattttttttccatatgcccaaggcaggcttacagggtgctgaccccaccccttaaaagtgctaatagtctctcaatgctcaagacaggagggagaattaggaatcaggagcctacccagagcttccctctttcctcactttcaaaattgcactgtgtctagacatagaatttatgcctgggttgggaaatatttatttacttattaatgtattcattcattaatctcactttctgcaatctgtgtaagtgaggggcagaagggaagaggggcacagagggagaggttgaacccaagggcaggtcctggcagtctgggcacaggctctgatcagccagggggaaggaagagggagcagctcctggtgccctggagggaggggatgccctgtccctgctgggcctcccacttcgttgtacccagggaatgcttttcagagaggcagagctcttagcagagtcccgtaaaccatacagtgagttgggcaggtgagtccaggggtaggggctgtgtggagacctgagaccaggtgtggcctggcatggacactgcccagctccattcttttagggaggacaaagtggacagaggaagagacaggagacatgggtgtgtctgagctttgggcagcaggggatgctgtggcctagccctgagggctgtgctgtggatcccagctgggagccaccccctggtcctggcctggagccctctgtcccctgctcactgggactagcagctgtgtcctcacaggtccctgagtacccacagaatagccacacccaggtccacactctcccggggttagctttccaggcagaggtcaagagtcagaacccaaggtggggtttagacagcccaggagaggaggctggtttgcaagtccctcctaacccccttcgccctgaactgctggaaggataggagagacttgaagaatccaggcccacctgagggtcctcaggacacagctgtgtggcgggtccccaccatggcctgggctcgtggcctctttccttttctccttcactgctcagctggctggggccaggcgtcagggctgaggatgaagggaccaggattgctgtgtgtgtccctgtccactaacctgtgtctcttactctttgtctgtcatgatattcagggtcctgggcctgttctgtgctgactcagccaactgcagtgtccaggtctgtgggacagatgaccccagcacctgcactgggagcagcaccaatgatgggagtatgcacgtgttttggtaccagcagtctccaggctgtggtgcctcagaaaccctcctagtcaacaacaccctgcccagcaggagcgggccatgctctgattgcccatctggggtagtgtcagtggggctcagtgagcagctgagctttcaccccaatatcctcaaccaggcgagcatggcagggctagtttgagctggtttatcctcccatccacctatgcctgattttggcagggcccagtcaggaactgaatttcagcccccatccccagcaatgagttgaatgaaatggtacaaggcagagcacaccagccctcagtattccctccctgaacccagactctggtggttatgggggccagggaggaccagagctttgtctcccacctggcaatgagaatactggttggggatggaagtcagtgtcgttggcacacctgctgtccccctccctgccctggtgtcagtgagtcctctttttctcatgaaagtgtcagcagcactggagtactgagagccagcgttctgcctttgctttggcagtgggaagctgaacctacaaacctgtgtccttcaacaactcaacaagaagatcacctgataaaagggagattagtggtgcctagaggctcaaaatacagtatttaaggtgtctagcattcagttcatgaaatcattgtcacatcaagaattaggacattcagaacccaaatgaaagaagacagtgacacgcatggacactgaagcaaactcagatgctaaaatcatatgacggatttttaaagcaacaaccacaaaatcccttcaatgaataattaaaaacactcttgaaacaaatggaaaagaagaaaatctcagaaaagagaagttataaaatcaaaccaactggaaattaaagaacctaataaactagagcacatttaaaaagaaagttaaggcaggactcaagaactggttacatttgagattcagtcactgggtgaggtgttccacacgacataaaaatacagtaaaaataagtaggtaaacacatgaaaatcaatgattctggtttgacttgggaaacattaaagtggaaaatataaagaataaaatagcatttatttattgaaagaaagaactacctttagctttttatcgtttccccattaatactctcttgaagatgttcccaggggacactgtgagtcttctcagaggtgagaaaagcctgaaataaactcccacgaatctcatttaatgggtcctggggcccatgctcactggtctgagttagaggtgatagcaggtgcttcctctcaagtggtgaaattagacctcacagcagcccagcccccctgacagtagagctgctctctcagctgaaaacaacagaagcagatggtgttggtgatggttttggtaaagtgcttattaatgtgtgaaccaaatatatgcccttcatctagggagctgcataggagataaaagaaccatctcagggtccagcagcatcttagagctctgcagatttttggaaagtttacatcatgccctggatgcttctcctccacttccccatcctgttcagtctttgcccaggttcatggagatttcaaagaccagcccatggagagagccctctgttcttccccattcctgtcgtgtctgtttcggtttcagtatccagttcttagggtgtggtgactgaggagccctcactgactctttcctgaggagggacagtcactctcacctgtggctccagcaccagagtggtcaccaacaatttctatccacactggatgcaacagaagtctggccaactttttgagacattgatttatgatgcaagcaacaaacattcctgaatgaccacctgattctcagaccttcctgggagcaaagctgccctgagcctctgggggacccaatccataggctagactgagtactactcaagctacacgacagtgggggttactgcagtgaaagatccagatggggagccaagacgtaaccctgcctctgacagcctggggagaaaatgatcacgtgatatcaggatcacatgaccagaaacctgagctctcaaggcggtctaaatgttgcctatccttaaagaaaaaggtaaacagaagggtctacatcaatatttattcctgtttgtgtccaaaagttgaggaaatccatcaatgaggaggaactgttccagaaaagcggattcctaatattttgtaatccaaaaggaatagtattgcctacatcagatccaaggaataaatttaaatatatttttttgcaggaggaataatcttcaacgatgtactttgccagctaagaacgaaaggaagaaacgttctttggtatattaataacattttttattaggttgtaattaaggtgtattgcacaatttaaaacatattaaaatgattttttgtaagaaattcttttttctatatgttatgtgttgtattggactctaaagaatatatgttaaagccctacaccccagtattcaagcacataaaatcatttgaaaatcggatcattgaagatataatagttaagatgaggtcattctggagtagggaggtctctttatcagtgttcctgggtccttgtaggaagtcaaccatgagaagacagagaggcacagggagaaagtcatgttaatatggaggcatggagtgaagttactcagctacaatacaaggaacaccaaagattactagcaaagaggaagagctgccaggaagaatcccaggaaggttttctctacaggtgtcagagggaacatggccccgccctatggatttggatttctagcttccagaactgtgaaacaataaatgcctttcattttaaatcacatgtgtagggttatttttatggcagctcaaggaaattattacaccaaacagtcattgtaactatttctgagtttgcatgcattctctcatcttgtttctcagttttttcaacaaatgtgaccatgtctgtcttcgtatttcttccttgtataactggcattgaaggttgacgtaagttattctcgctgtcacaaaaattatataaacatgtaaataaggcttaattttattttgttcgtaggtacaaatgcaaaactaattccaattgttttgtaagaaatttttgtaaatatttttctcatgtaaattagaagggtctcttgagttactgaaacacttctggccatttctgtgatcttgtggtgtcaggatgagatggctaccatgttcaatgaaagcttcaaatacattattattttttctaggtttttaaaatttaatacagtctaattaaatagtaacagcagtaactaaatgcactgaaaaacagacaggtgcctgcctatatctggaataaaattacatcaaactagtctccatggtaaaaaaaaaaaaaaaaaaagacaactgctgatatccatggttagacaagtcaaggacaacttggaatttctaaagccatttttctaaaaatcaacagcaacagggacacaactacttcaaggggtaaaatatctatatctacattgttttttattaacgaagattgagttgcacctaaacagcatggcattcttatctttagccttaaaggaaaagtgaaagtattttccatttgcaccagtttgaaatatttctgaaataaggattacttcaaatgaattattacattacttatacacataagagggtctcacatatagtgaaaaggcaaacccaggattttaacgtcaaccttttaaagttgatttgattgcataaaatgagagagaaattctcacacgcataatctgtttaacaaaactcctcggtgaatcaggatgcaaaatataaaatgttctaagggagactctgatgagcaggcatataaaattgaagtgaaacccatgtcagcttcgttcctcccacttctttggtgcttctatgaggagctctttctctactgcaagagcctggacttttgacctaatggagaagaacctcaggaaggcaaggcattctgataaaatgccccttgagaccttttattttttaatttaaagggatcaactggtcttgttcagccttaggaaagaaagcatcactcagataaaagtatttggggaaactttaaatacctggctacctcttgatatatttaaattagattgacttcagctgttcttagaaagcattctgcatagttatccagagcagccactgaagttctggttctccttacatggctgcattcagaggtactccacatgaggcatgtttagaaaaagaaggacccttatacttgggagtttttgttcttccacgtaacctgttagtactgttggtaaaggcagtccccagatggcaccagtgcattttgtcaatggtgagtctagacagtgttgcaggggtgttgctgatgagtagaacagtgagcagataaaggtgagcagtgttgatctaaaggctttggggtccatctgcttatccttgcacacctgaacaaagtcatcagatgtgccacaccatcaaactgttgaagcttggacttgatacatgatagagttccatgccaattgcccatcttcatattcaacttgcagattagttggtccagctgatattttaacagatactgttagtagatcatctgaatgtgaactatctctaaccaagaaatttccttctggtgtctcttttaacttttctttggcttcattaacaatcatccttccccagtgccatcctgtttgagctcctacggggacttcaccagatgcaccacctccagggaaggttcctgtgctgaccctgctcctcactggctctgcatctattccctgccattcccagagggctggagacaccacagggtcatggaagtaaggtcactgaggcaaagacagatggccacccaaactgggtgagaaaggagctttcatttttcctggaagtcagtgggaacccccccaatcaaccctatgggtttctgaaatggtggaagatggggaaggaatgaaaagctgcctgtttttctcaacaggtccaggttgagggatgacaaagttccttgcagatgcatcacccacagatcaccagcaggaggatcctgaggctgcggtcagtgccctggcacaggacacatgggccatgtcccatgcagcaccggtggctccgagtgagagggcttatgctgcaggggaagccaaagattcctgagccacagcggtaagacatgagatgacttaaatatctgtccctcaagtatattattcttaatatttaatgcacaaaatagtgaaagaagagattagcttgcagtgcaaattgaacagattcagtatagcttgaggcatgagaaacaacagctctattaccatttaccaaaaatacaccctgaatggacagggggtgcccgtgagctggagatagggtgccccaattgaggaaatataaatactggttatcagttaaatttgaattcatgtaaacaaccatttaatagatttttatttttagtataattatgtcctatgcaaagttacttatctttaattctaatgtaactggatgtcttgcatcttgtgagataccattcccagcattcccagctgggctctgacatctgagtctatgctatttacctcaaaaacagagttcctgtaacaaagttatccccaagtaagtacttcggttagaaataaatatgtctgggctgggcacagtggctcatgcctgtaatcccagcactttggtaggccaaggcaggcagattacttgaggtcaggagttcaaaaccagcctggccaacatgatgaaaccctgtctctaccaaaaatacaaaaggtagccgggcgtgggggcacctctgcagtcccagctactggagaggctggggtgggagattcacttgaaccgggaggtggagcttgcagtgagccaagattgcaccactgcacttcagcctgggtgacagggcaagtctctgtctcaataaataaataaataaataaatacataaataatttataaataagtgtgtcatcccatccacctcaaggctgtaaaacctagcatgccttatccctcctcactttcttttttttttttttaattatactttaagttctagggtacatatgcacaacatgcaggtttgttacatatgtatacatgtgccatgttggtgtgctgcacccattaactcatcatttatattaggtgtatctcctaatgctatccctcccccctacccccatcccatgacaggccccagtgtgtgatgttccccttcctgtttccaagtgttctcattgttcaattcccacctatgagtgagaatatgcggtgtttggttttttgtccttgcgatagtttgctcagaatgatggtttccagcttcatccatgtccctgcaaaggacatgaactcatccttttttatggctgcatagtattccgtggtatatatgtgccacattttcttaatccagtctatcattgatggacatttgggttggttccaagtctttgctattgtgaatagtgccgcaataaacacaggtgtgcatgtgtctttatagcagcatgatttataatcctttgggtatatatccaataatgggatggctgggtcaaatggtatttctagttctagatccctgaggaatagccacattgtcttccacaatgcttgaactagtctacagtcccaccaacagtgtaaaactgttcccgtttctccacatcctctccagcacctgttgtttcctgactttttaatgattgccattctaactggtgtgagatggtatctcattgtggttttgatttgcatttctctgacagccagtgatgatgagcattttttcacgtgtctgttggctgcacaaatgtcttcttttgagaagtgtctgttcatatccttcacccactttttgatggggttgtttttttcttgtaaatttgtttgagttctttgtagcttctggatattagccctttgtcagatgagtagattgcaaaaattttctcccattctgtaagttaactgttgtacttagttgtactgggtttgatcgtagtttcttttgctgtgcagaagctctttagtttaattagatcccatttgtcaattttggcttttgttgccattgcttttggtgttttagacatgaagtccttgcccatacctatgtcctgaatggtattgcctaggttttcttctagagtttttatggttttaggtctaacatttaagtctttaatccatcttgaattgatttttgtataaggtgtaaggaagggatccagtttcagctttgtacatatggctagccagttttcccagcaccatttattaaatagggaatcctttccccatttcttgtttttgtcaggtttatcaaagatcagatggttgtagatgtgcggtggtatttctgagggctctgttctgttccattggtctatatctctgttttggtattagtactatgctgttttggttactgtagccttgtagtgtagtttgaagtcaggtagcatgatgcctccagctttgttcttttggcttaggattgtcttggcaatgcgggctcttttttggttccatctgaactttaaagtagttttttccaattctgtgaagaaagccattggtagcttgattgggatggcattgaatctataaattaccttggggagtatggccattttcacgatattggttcttcctatccatgagcatggaatgttcttccatttgtttgtgtcctcttttattttgttgagcagtggcttgtagttctccttgaagaggtccttcacatcccttgtaagttggattcctaggtattttattctctttgaagcaattgtgaatgggagttcactcatgatttggctctctgtttgtctgttattggtgtatgagaatgcttgtgatttttgcacattgattttgtatcctgagactttgctgaagttgcttatcaccttgagattttaggctgagaggatggggttttttattttattttattttattttattttattattattatactttaagttttagggtacatgtgcacaatgtgcaggttagttacatatgtatacatgtgacatgctggtgtgctgcacccattaactcgtcatttagcattaggtatatctcctaatgctatccctcccccctccccccaccccacaacagtccccagagtgtgatgttccccttcctgtgtccatgtgttctcattgttcaattcccacctatgagtgagaacatgcggtgtttggttttttgtccttgcgatattttactgagaatgatgatttccaatttcatccgtgtccctacaaaggacgtgaactcatcattttttatggctgcatagtattccatggtgtatatgtgccacgttttcttaatgcagtctatcattgttggacatttgggttggtttcaagtctttgatattgtgaatagtgccacaataaacataggtgtgcatgtgtctttatagaagcatgatttatagtcctttgggtatatacccagtaatgggatggctgggtcaaatggtatttctagttctagatccctgaggaatcaccacactgacttccacaatggttgaactagtttacagtcgagacgatggggttttctagatatacaatcatgtcatctgcaaagagggacaatttgacttcctcttttcctaattgaatactctttatttctttctcctgcctgattgccctggccagaacttcgaacactttgttgagtaggagtggtgagagagggcatccctgtcttgtgccagttttgaaagggaatgcttccagtttttgcccattcagtatgatattggctgtgggtttgtcataaatagctcttattattttgagatacatcccatcaatacctaatttattgagagtttttagcatgaagggctgttgaattttgtcaaaggccttttctgcgtctattgagataaccatgtggtttttgtttttagttctgtttatatgctggattatgtttattgatttgcgtatgttgaaccagtcttgcatcccagagatgaagcccacttgatcatggtggataagtttttgatgccctcctcactttcaaacagtacaacagttaacatttcctaaccattggagatattaaagcacagatcttttatatgagattagttaaaatttttatctttaatgcacaagagtttgggaacattaggaatttgtacatatgctaaattatatgtaaatgaaatgatacgatgtttggaatatgttttaaaattagttgagtgtgtggagtgaggggtaaagagggatgtaagatgaataagacaattttatgttgatgatgatttagttgggatgctgggtccaggacatgcaatgggcttttctccatagatgtctgcaacttcaaaaacatccacagtgacaaatgtgtaaaaaaaattctgtgaactcttctgtggtggtgtgtgtattgaggtggataagggaccccctattaagggcctgacttctccccctgaagcacggaaataaaggagaatcttgagtttcttcaagggaaatttcaggtacctcactgtccctgagaagaaaacctgactagcaaaaaggttaaaggagcttaaaacaaccaaggaagttagaggcatgggatgtctgggtccctatagaaactaaaaacaacaacttaacatatgcccctgagttgtttttcaaacactcagaccacctccaaaagtctcggctgtcagtaggcctcagataatgggaaactgaggactgaggtctgactgcccttctttgttctaagtctcttactgaggggccctgaggaaatcacgcccatgagccagagctaacatttctttctgttgaccccaattttttggacaaagctttacgaccttaaccagttgcaaatcaggaaatttctaaatctacttacctttgatctgaaagcccctgcttcaaaatactctactgttttaggccaaatcagtgtataacctctatatattgatttacagttttgactatgacttctgttttctgaagatttcccctgcttttaaacacctttgctttcaggccatcagggagtttgggtcttaagcatgagctgcccgattctccttgcttgatgcctgtgataaatgtctcattctcttgctgcaatcctgatgtcagtgcttagatttgtatacctggtcaatggattcaagtttggtccattaatagtgtgtcttgcttttaacagacactcagagttgccagatggtgtgcctccaccctgacctccagttgaagctcatctcctccccgcacacagaggaggacttggtgagaaggccacagaatggaaaggagctcagggtttcccaggaaagagaagtgagtgatactggaggccccagagcaagaggaagggctgtgaggtaggcaggggccataaagtgaagggcatgctggtggggctgcaaggtccagggtttatgtaaacagcaatgaagaaccacaaaaggagtttaagcccaggagtaagatgaacaggctgaatgagaaggatgtctccagctgcctcgaggagaaaggcctgagggcaccaggggatcctggtcatagattattcactaagagaacctgtgagtctagaagtttgaagactatttgcacagttaaagcagatttgcatctgggatacagtgaagaagtgataatttctgcattaatctgtccagtcattcaacgtttctgcagaaacattaaaaggtcacacttatctttcttagtaagccatgaaaaaaatgtaagtagggaaaattaggtttagaatataaacaaattgtattctatctaaaacaaaattctattgagaagtagatgaaacagataagcagaaaaataaaaaggtaggaagacaaaactcacttcataaaataagaaatgtgttacaccatgaactggtaaatgttatgcctacccaactattattttttcacaaataaaatctagtgagtatcaacatgctaaaatcatggtgtgacttaggaaatgttttctgggccaggtgcggtggctcacgcctgtaatcccagcactttgggaggctgagatgcgcggatcacgaggtcaggagatcgagaccatcctggctaacatgatgaaaccccgtctctactaaaaatacaaaaaaaaaaaaaaaaaaattagccaggcgtggtggcaggtgcctgtagtcccagctactcaggaggctgaggcaggagaatggcatgaacctgggaggcggagcttgcagtgagctgagatcgcaccattgcactctagcttgggcgactgagtgagactccgtctcaaaaaaaaaaaaaaaggaaatgttttctgaattgctggatgttaaatctatcactgaggtgattcctgaaacagtccccttctatgtcattgccttgaacaaccccttcatgccactcaagtcagcacaactgtttcagcatctgtggtggtgccatagtgacgtatgcaggtcacttagctttttctagaatgtactcttggggcactggcaccttaaaaggttataaaatttttaaacagttataaacgaacatatttgctcctctcatagatcaagactacttataggagtgagatactggctaggcatctagtagaccacgtcatcatcacaggatataggattcaggacacagatgtgtatacagaggaatagtgtcctggtgagctgcagagatcagctgggctctctggtctctgagccatggggaggtgagtgtcctgctatcagcaggctgcactgtgggacttgcctgtggtgtctgcacagctgctctttaagaaccattcattccaaggagcctaggtctaggggctgggccttgtgctcattgatggggactcggcagctgtcttctctggtctggcagagtctgctgaacagggacctgtgtatggtctcagcaggtgatatctcctagggcccttccaaggagggaaagcaaatcatcttcctcagtctgcagtgtgagctgggctccagccccagggctcaggaagggactgggcagtccctgcatagaaacacatttgcatgagcagcccctcctctgctgggggttgggaagaaaaggaggcctggggcagctcaggctcactgtggtggtcaggggctgtgtccaccatggccagaacttctctcctcctcctgatcctctttcactgctggcctgaacttctcttctccttatgctcctctctcactgcacaggtaaggacaggcctcggagatcaggactcagttttcagcctgcatcagtccctcaggctcaggaacccatgacaaatttcatcctcatcttaaccctgtctcttatttgtgtctgtgtttacaaattccctctcccagcttgtgctgactcagctgtgtcctcccccctacttcctgtatctctgggagcatcttccagactcacctgcaccctgagcagtggctgcagtgttgacatttatctcatatcccgctgtcagcaaaagccagtgagcccttcccagtatctcctgatctacctctcaaaagtcaagtaaaactagggctctggagtctccagctgcttctctaaatccaaagatgccttggccagtgcaggcaatttgctcatctctggggtccagccagaggacaagactatctgttctatctattactgtcagacctgggatattgatacttcagttacacaggcagatgagaaagtgagacgaaactcagcctactaagaatggaactatggctctttttccaattgtcaaataattttcacatacacaaactattttggaagtagctactgattcacaatggttctctcaatgtcccattcaatgtttctgagtcctcaggcaaactaacaacaaaacaatgataaaacatatgacaaaacatatgataacactgactctttccctgctgaaccacatgtaataaaaccagaggagctggtttaataaaacctgaggagctgacttttcttttaaaagaaaagatgacagtcttttggagtctttttcttggtcaaaatttcctagaccatcccagcaggtggacagtcccctacagaagacacgatcctgggaggaatcccaggtacagagctggcctgcttcacttgtgggtacctgccccttcaattgtgaaatcagggaggggagagtaagcatagggggtaggtgaggatcaggaaaggggcaaggccactacatttcattaaccacctttggactccagtgcaagatagaggctgatgatcccatcacacaggtgactacaacctccttgtcatcaacagctcctgcccatggggaagcgaaatgaaaatctatccccatccctctcttcttacatatccctgtcctgcccctgccggtgaccaacaccagctcaggttgaattttgttttgtcacttgtgctattaaagaaaataactccttctcttactggtctcctagttcagacagaatcagtttgtttccagaaatagaaaacgctgctcacacacatgagtgtaaagtaaggatgacaaaaagaaaaaatccaggctatgtggcccagagacccaggtgccctctgattggcctcatagatgtcccctcctcctggcccaggtttgcttgtcattccttaagctctggaaccttgaactacatgggttctgtcttcatagatacagaagaaaaccctccccaagaaggagatggttcccagaaccagcacatgctcacttttctctgtttaattccacacatctgacttatttttgcttccatgagcctttgttgaagatatctctgaatacctctcatttctgttaggtctacagcctatggacctatctccattatatttgtgcttatttttctaacctttatgactgattatcatttaagcttaatatgagatatgcatctatattaaagatatataaatatgtcatcaatggtcaatattattaaagttataagtagtaatgcaaaattgtagctattatatcatttcacttgttcactaacattaatatgtgaagtgagaagatcactttattaatcacgcactcctggtcatgtgtgcggatgagtaagctcaggggggatgctgccatggtccatgggaagcctcaagaacagcagacctggcacatcaggcacaacatgggacacagggagtgagccatgtcagcagaaagcagaatagactgaggcatcagaaacaacccattgccaaactctccactgccttcctgcatgggtcagaccagagctgctcaaacataacgtgcacacagatcatctgggctcctggaaaatgtggactcaggggtctaggatgaggactgagattctacacttctaaagatcccttctcctacaaatccacatatgtgtttctgtatcacaaaattagtaagaatgggggaaaataagaaggaaagccatttgtagacaggaagcaaagaaacatctttcgcggagagaactacagaattttcatgaagaaagacttccagttgaggcaggcagacaaccagagaggacagccgagaagactgaggaggctcctctttcttcacaaaacaaacaaatgaaagcaaaaagacaccaagcctcccccttacctgccctgccctctggctcctgtccaatctccccaccagcttctccttcagcctcttctaaattgtggaccctcctcaccttcccttcaggagatgccctgagtccactgcttctctttcccaaccccactagcaccttccgctacttcctgggtttctcctcagctaccagagaatgcagtgaaccatccaatccaaataaattatcctgttaaacattgaccagtaggtctcctttgtgcggatctgaggaatcaagcagggagaaagaacctgactttgtgagctgcctgagaaatgagttcatggctgaagtgtcccttttctcagctaacatgttttatttcatgcacagggtgtatacagagacaatcttcccctgaggactccataaaagatggggagaattgtgtgtccagttcccattgaggagacacacacagaaaactaaaggctgaggtgaggtaggaggctgccctgaggacgggccttgccctgcccttggtcagggagtgagcagtgttcaagaccctggtggggacaggaggctctgtcaggaccccggcatctggtcagagacacggtggacctggacttgagcagcaggggatgctgtggccctgctgctgagccctctgtggggctgtcagctgggaaaccagaaccctgtgtggtctgtgctcagagatcactgggccaagtagctggatcctctgtgggctcctggggagcctcaggccaggctggatcctctgtgggctcctggggagcctcaggccaggcccaagttaggcccacccctcccagaaatgacacagccattgccgctgcatacagccccagggaggggtacggttgggcagaagagagacaagtttgcatgaagggcccctctctctcttctgggactaccggatggataagagggacctgcatcatgtcagcctcagcagagctctggggtgtttgcaccatggcctggaccccactcttcctcctcctcaccctcctcctccaccactgcagaggtcaggatggcccttagcaccctgatcctgcagctcactcacactgcctcacaaactcataccaggaatgtccttccctcttatccttacttcaggccataatgggcgtctatgtcttcagggtccctctcccagcctgtgctgactcagtcacccactgcatctgcctccctgtgggagcctcggtcaagcttacctccactctgagcagcaaatacagcacctacattattgagtggcatcagcagtagccagggaaggtcccttggtacttgatgtatgttaccagtgatggaagccacaaaaatgggatccccagttacagttctcaggatccagctatggggctgatcggtaggtcaccatctccaacatccagtttgaggatgaagctgattgtatctgtggtgcagatcatagcattggtgtgacatatgggtaaggcaaagtgaccccagtgaatgaggaagcaggacaaaaactgttttctctgctccactatgaaggctgccacgtggccctgagaaacagtgcctgttttccttactactcaagaaagatagatagatagataggcagatagctagctagatagatagctagctagacagataggcagatagctagctagctagctagctagacagatagataggcagatagctagctagatgctagatagacagatacctagatagctagatagattttttgctttgggttccttaggaacaagtttgctaggccaagctcctaaggagtacacaagtctgtattaatgtggccaatattaaggcagatcctgtcaccccctgcatgtcgatacattgtcaccacatgggaactgcaaggacatttttccctgtggatttaaacactggaactctgctgcatggcacacccctgccacatcaagtttcattttaacaatcacccataagatataacttcttaagaaaattttgaattctaacaaaatgctagaaatcacactgttgatacacagcgatggaaataatgaaaatttatagacagtgaaataaaaagatttaaaatttttggtggtttataaaggttttctcagttgttcagtgcgtgggttttgggattaggagaaaatgaggagaaactgcctccaccacattgaacatgacaactgatttgcaataatctaacaaagaagaaggatataaataatcattaatgtcatcctgacagccctgatcctaaatgtcagaattttatttcttaacttttttctccaaaaaaaaaatgtagcttcagaaaaacttctggaatggtggtatgaggccatcagaaaacctgattcaccatacaagcaatgagaacagcagtaaaaatgatataaatctacttttcagaactctgtacattaccaaaagcttacaaaattctgggaatcataaaaaatagtaataacagccagacatggtggctcatgcctataatcccaacacattgggagctgaagcagagcgattgctttatcactcctgggattttgtgatcagactgggcaacagagtgaggcctcttctctaaaaaacattttaaaaaagtagctatatgtggtggtgtgtgggtgtagttgcagctactggggaggctgaaggtggaggatcacttgagtctgggaggtggaggctgcagtgggctgtgattgtgccactctacttcagcctgagtcataaagcaataccctgtctgaatcaatcaatcaatcaattaaaataatgtggaatctctgtaagaatctgaagctttgtggtgattttatttcttttgctctctcccaagttccacagtagccttaaaaaccaacagcctcaaatctcctggatctagggaaactagaaaaatagcattcactgaagcaaccaaataccagatctggaattttctcaaaagccccattcccgtgcgactgtcattatttgagctttccaaagctcagaaaagcttcacgctctgtacttttctaaatgtgaattgtctcagagctcgcttggtttaaacagcttcatcctcaatacatttatcaaaacaatcagtgagatctgttaaggtcctgagtcagtgatacaagatggggtcaataaaaggctgaccaaaaaccttgagagaaaaaaactgggtgtcagaatctgtagaagattttgatgagctctgccatattcctggaaagacagaagatcactctcatgctcagagttatgtgcatggccaggtaaaaattaggaaagtccttaattttcgacactggctgaaatcaacaaggaaggctaaaatagagttgtaaagtggcggggttttgcagtcatgacccaacccctgcacagagcattcggcaaatgctgaggaatgtgttgttcgaggcgtttaagaacatgtctgtccaataataagctaatgactgatataattgagcagagactgcagtggctgcacaagcaaagaaaacagacttagagaattattccagtaccgtgaaacaataaatcatcatcaacaataacaactacaacaaaaccagaagcaattatgacaaatattttaaggaaagaatctgatttccagaatcgtcacattgtgtgactgagaagctccatttggcaaagtgaaattttgaggcagggacacagcaaagtactgtccatacacagggttaaaaaggaaagcaaagcaaaacataaaaacaaacaaacaacattaaaaataagttgacaaaatgatgtccagagatgcatttggtggttactacataaaaacttcaaattagcttttgtaaatgtggtcaaataaataaataaaacaacgttaacaattgttaaggaaagtacggaaagaatgcctcattacagagagaacattggcggggtgcagtgcctcacacctgcaatcacagaactttgtgaggccaaggcagacagatctcttgagcccaggagtttgaggctagcctgggtaacatggccaaaccatgtctctacaggaaatacaaaaaagctagctgggcatggtggtgcatgccagtagtaccagctactcaggaggctgaggtgggaggatttctggagcttgggaggcagaagttgcaagagcaaagatcatgtcaatgcactccatcctgggggacagagcaagagtctgtctctaataataatataataataataacaatagagaatactaataaagaggtatagaagaaaggatcattgaattaaagacagataaattgataattattctgttccaagaatagaaaaaaatgacaaacagtctgcacaacctgagagacgatgtgacaccaatcaaatgttccaatacacacatagtaagtttcagtccttccaccatgtgagctcgcagtgagaagatggcagtctatgaaccagtaagcacatccttaccaaacaccgaagtatctgcttgtactttgattttggaccttccagcttccagaactaaactctgacctattttttttggacatttgcatagtgtgggcctcagaaggaagctggctggaatttgacatcacagccactagtagtctgtgggttgtaaccccacagcataacatggggcttcagctgagcgtagtgacagaggatggagtccacatccaccctctagctgcagacctggtgggcagagacagcacttaggctatgcagcccttcatggtggctttcttcaaagtcattgtggtccatgtgtgcatcaccaggtcagcctctggctggcgttgacagcagagttgtactcactttacccagtcccactacgtggctcaagtctccagtacttcagattacatcagcagcaaattaaaaacagcctgcaggaagcatgagctatatgtgagcttccaagacctggatggcaggactggttcatcgcacccaagggctatgctgctaattactgtgatgtagaatgctccttcccaatcaatggacatgtgaatgcaatcaaccatgtgatcattcagaccttggttcaccttatagatcctgaatatgtcccaaagctgtgctgtgtgccaactaaactcaatgccattttggttctttacttcaatgacaattccaaaatcaccttgaaaaaaatacagaaatatggttgtaagagcttgtggatattgctaacttgaaaccagatgctggggacacacattctgccttggattccttggtcatagctgccttaaaaaacatacagaagcacagtggaggtggagggataagactttgaaaccatctcatgctgatgccttactgcccgagaaaaattttaacggaccttgctaataatttgctcacttggtaagtaacatgagtagttgttggtctgtactaagctgagtttggttgtctggtaactacagaaacttaaacttaaaaggtaccccccaagcccaccaaatttaattttagctatagttcaagctatttgggttattagtgagtaaatagggaaaataatctcaatggagttaaatgtattcttgggtaaagtatcagctggtttattagtgtctatcaaaggtacattttacagatagtgaaagttggggaagtaggaataactcctctattcacagatttcattcccaggaaggcaaattttatactggatccacagtccaggccatagcccgggctccttggggatgcctctgtctcagtctttgctgttatgagtttgtgctggagttctgttggtgtgaaaatatacttatttcagtcaaaacaaaccatatcattttcacatctcagtcctccatttgctgtattctttgctagtacccaaagtagactgattaaactttgaagtgaggcttagaggagtggaaagcatttgtgacaggctccatggtaactgtgtaacatgtgaaagcaatgctgcacctcttctttattggaatgactttttgaccagcacattaacttgaggactgccgactctaatatctatttcaggaaagcggtgctttgtctttttactacagagcataccacgtgattgggttagaaccaacaaaggaaataaaatgggaaagggtgccccacctttaagaatggctttagggggatgagtgtgccatttatgaatggaaattatgattttctcttgtagaaaggaaggctcagattaaattttagaatatttttaaaatatctttttcaccaacatgtactgggaaagcaatttcatactaaactgattaaatgatagttttataatctataactgcagtaatggttttttgtaaatatgaagtataatttattttatatctgttttgctgtaacattgaaggaaataccagacattttctttaagtgtttatttagaaagtaccaggagatggttccaagatggccaaataggaacagctccagtctacagctcccagcgtgagtgacgcagaagatgggtgatttctgcatttccaactgaggtaccgggttcatctcactggggcttgttggacagtgggtgcaggacagtgggtgcagtgcactgagtgtgagccgaagcaggatgaggcatcgcctcacctgggaagtgcaaggggtcagggaattccctttcctagccaagggaagtggtgacagatggcacctggaaaatcgggtcactctcaccctaatactgcgcttttccaatggtcttagcaaacggcacaccaggagtttatatcccgcacctggctcagagggtcccacgcctacggagcctcactcattgctagcacagcagtctgagatcaaactacaaggtggcagtgaggctgggggaggggcgcccaccattgctgaggcttgagtaggtaaacagagtggccaggaagctcgaactgggtggagcccaccacagctcgagaaggcctgcctgcctctgtagactccacctctgggggcagggcatagccaaacaaaaggcagcagaaacctctgcagacttaaatgtccctgtctgacagctttgaggagagtagtgattctcccagcatgtagcttgagatctgagaatggacagactgcctcaagtgggtccctgacccatgagtagcctaactgggaggcaccccccagtaggggcagactgacacctcacatggccagatacccctctgagatgaaacttccagaggaatgatcagacagcaacatttgctgttcagcaatattcgctgttctgcagcctccgctgctgatgcccaggcaaacagggtctggagtggacctctggcaaactccaacagacctgcagctgaaggtcctgactgttagaaggaaaactaacaaacagaaaggacatccacaccaaaaacccatctgtatgtcaccatcttcaaagaccaaaggtagataaaaccacaaagatggggaaaaaacagggcagaaaaactgaaaattctaaaaatcagagtgcctctcctcctccaaaggaatgcagctcctcaccagcaatggaactaagctggacagaggatgactttgaggagttgagagaagaaggcttcagacaatcaaacttctccgagctaaaggaggaagtttgaacccatcacaaagaagttaaaaaatcttgaaaaaatattagacaaatggctaactagaataaccaatgtagagaagtccttaaaggatctgaaggagctgaaaaccatggcacgagaactacgtgacgaatgcacaagcttctgtagccgatttgatcagctggagaaagggtatcagtgattgaagatcaaatgaatgaaatgaagagagaagagaagtttagagaaaaaagaataaaaagaaatgaacaaagcctccaagaagtatgggactatgtgaaaagagcaaatctacatctgattggtgtacctgaaagtgatggggagaatggaaccaagttggaaaacactctgcatgatattatccaggagaacttccccaacctagcaaggcaggccaacattcaaattcaggaaatacagagaatgccacaaagatactcctcgagaagagcaactccaagacacataattttcaaattcaccagagttgaaatgaaggaaaaaatgttaagggcagccagagagcaaggtcaggttacccacaaaggggagcccatcagactaacagctgatctctcggcagaaactctgcaagccagaagagagtgggggccaaaattcaatattcttaaagaaaagaattttcaacccagaatttcatatccagccaaactaagcttcataagtgaaggagaaataaaatcctttacagacaaacaaatgctgagagattttgtaaccaccaggcctgccctagaagagctcctgaaggaagcactaaacatggaaaggaacaaccggtaccagccactgcaaaaacatgccaaattgtaaagaccatcgaggctaggaagaaactacatcaactaacgagcaaaataacaagctaacatcatgacaggatcaaattcacacataagaatattaaccttaaatgtaaatgggctaaattctccaattaaaagacacagactggcaaattggataaagagtcaagacccatcagtgtgctatattcaggaaacccatctcacgtgcagagacatacataggctcaaaataaagggatggaggaagatctaccaagcaaatggaaagcaaaaaaaggcaggggttgcaatcctagtctttgataaaacagtctttaaaccaacaaagatcaaaagagacaaggctgttacataatggtaaagggagcaattcaacaagaagagctaactatcctaaatatatatgcacccaatacagaagcacccagattcataaagcaagtcatgagtgacctacaaagagacttagactcccacacaataataatggaaggctttaacaccccactgtcgacattagacagatcaacaagacagaaagttaacaaggatatccaggaattgaactcagctctgcaccaagcagacctaatagacatctacagaactctccaacctaaatcaacagaatatacattatcagcaccacatcacacttattctcaaattgaccacatagttggaagtagagcactcctcagcaaatgtaaaagaacagaaattataacaaactatctctcagaccacagtgcaatcaaactagaactcaggattaagaaactcactcaaaactgctcaactacatggaaactgaacaacctgctcctgaatgactactgggtacataaagaaatgaaggtagaaataaagatgttctttgaaaccaatgagaacaaagacacaacataccaaaatctctgggacacatttaaagcagtgtgtagagggaaatttatagcgctaaatgcccacaagagaaagcaggaaagatctaaaattaatacccttacatcacaattaaaagaactagagaagcaagagcaaacacattcaaaagctagcagaaggcaagaaatgactaagatcagagcagaactgaaggagatagagacataaaaaacccttcgaaaaatcaatgaatccatgagccagttttttgaaatgatcaacaaaattgatagactgctagcaagactaataaagaagacaagagagaagaatcaaatagacacaataaaaaatgataaaggggagatcaccactgatcccacagaaatacagactaccgtcagagaatactataaacacctctatgcaaataaactagaaaatctggaagaaatggataaattcctcgacacatacaccctcccaagactaaaccaggaagaagttgaatctctgaatagaccaataacaggatctgaaattgagacaacaattaatagcttaccaaccaaaaaaagtccaggaccagatggattcacagccgaattctaccagaggtagaaggaggagctggtaccattccttctgaaactattccaatcaatagaaaaagagggaatcctctctaactcattttatgaggccagcatcatccttataccaaagcctggcagagacacaacataaaaagagaattttagaccaatatccctgatgaacatctatgcaaaaatcctcaataaaatactagcaaactgaatccagcagcacatcaaaaagcttatccaccatgatcaagtgggcttcatccctgggatgcaaggctggttcaacatatgcaaatcaataaacgtaatccagcatataaacagaaccaaagacaaaaaccacatgattatctcaatagatacagaaaaggcctttgacaaaattcaacagtccttcatgctaaaaactctcaataaattaggtattgatgagacgtatctcaaaataataagagctatttatgacaaacccacagccaaagtatcatactgaataggcaaaaactggaagcattccctttgaaaactggcacaagacagggatgccctctctcaccactcctgttcaacatagtgttggaagttctggccagggcaatcaggcaggagaaagaaataaagagtattcaattaggaaaagaagaagtcaaattgtccctgtttgcagatgacatgattgtatatttagaaaaccccattatctcagcccaaaatctccttaaggtgataaacaacttcagcaaagtctcaggatacaaaatcaacgtgcaaaaatcacaagcattcctatacaccaataacagacaaacagagagccaaatcatgagtgaactcccattcacaattgcttcaaagagaataaaatacctaggaatccaacttacaagggatgtgaaggacctcttcaaggagaactacaaaccactgctcaacaaaataaaagaggatacaaacaaatgggagaacattccatgctcatggataggaagaatcaataccgtgaaaatggccatactccccaaggcaatttatagattcaatgccatcccaatcaagctaccaatgactttcttcacagaattggaaaaaactgctttaaagttcatatggaaccaaaaaagagcctgcattgccaagtcaatcctaagccaaaagaacaaagctagaggcatcatgctacctgacttcaaattatactacaaggctatagtaaccaaaacagcatggtactggtaccaaaacagagatataaaccagtggaacagaacagagccctcagaaataataccatgcatctacaactatctgatctttgacaaacctgacaaaaacaagaaatggggaaaggattccatatttaacaaatggtgctgggaaaactggctagccacatgtagaaagctgaaactggatcccttctttacaccttatacaaaaattaattcaagatgggttaaagacttaaacgttagacctaaaaccataaaaactctagaagaaaacctaggcaataccgttcaggacataggcatgggcaaggacttcatgtctaaaacaccaaaagcaatggcaaccaaagccaaaattgacaaatgggatctaattaaactaaagagcttctgcacagcaaaagaaactaccatcagagagaacaggcaacctacagaatgggagaaaatgtttgcaatctactcatctgacaaagggctaatatccagaatctacaaagaactcaaacaaatttacaagaaaaaaacaaccccatcaacaagtgggcgaaggatatgaacagacacttctcaaaagaagacatttgtgcagccaacagacacgtgaaaaaatgctcatcatcactggccgtcagagaaatgcaaatcaaaaccacaatgagataccatcccacaccagttagaatggcgatcattaaaaagtcaggaaacaacaggtgctggagaggatgtggagaaataggaacactgttacactgttggtgggactgtaaactagttcaagcattgtggaagacagtgtggcaattcctcagggatctagaactagaaataccatttgacccagccatcccattactgggtatacacccaaaggattataaatcatgcttctataaagacacatgcacacttatgtttattgcggcactattcacaatagcaaagacttggaaccaacccaaatgtccatcaatgatagactggattaagaaaatgtggcacatatataccacggaatactatgcagccataaaaaaggatgagttcatgtcctttgcagggacatggatgaagctggaaaccatcattctgagcaaactatcgcaaggacagaaaaccaaacaccacatgttatcactcataggtgggaattgaacaatgagaacacttggacacagggtggggaacatcacacactagggcctgtcgtggggtgggggtaggggggagggatagcattaggagatatatctaatgtaaatgacgagttaatgggtgcagcacaccaacatggcacatgtatacgtatgtaacaaacctgcacattgtgcacatgtaccccggaacttaaagtataataataataataaaaagagtcagccccctagcctggcagtgctgctctacaggcaccctcagccctgatcccttcactgcacctaggggacacagtttacaggactgagtcagtgggacaccctgttcctttacattcccagtcatgggctcagattctgcacttgtctcactgctggagggaggagcctgcatcagtcaccctcaaagaagacatgaagttatttcacctgtaaaggcaagaaactgttcgcagcactgggggcaggcttggggaagatgaggtttgtgaggatgttgagaattcatgcagctcatccttcagccctatagctttccagagaagtgtataatgggggtcactaggcatgtgagtaactgatttggtgaaagatgccacttcagatcaaaagtgcatttccccttccccaaggtgtcagcaacactgaaacatatttgactaactttatagaggaagattaagatagaggatgagagagacataaggcctcaggaatatcttagccaatagaaagcctgctggaagatgcatttccaatatgattagactgattgaaaaccttgaaactaaacacttccaaaggagactgggacccatttctcctgagaatgacaacacaaaaaatagtagaggaaaccaacaaaccaaaagcagacactgtttcagatctattgaaaatcctcaagatagtctcataatataatattcaaaatatctaggatacaattcaaagaaacacttgttatatcaagaagtagaaaaattcaccatttgaatgagaaaaggcaatccagacatcaacgctgagatgatttagggctgaaattacctgacagatatattgaaatcagccaccataaaatcctgttgatgagcaatttcaggcattcttgaaacaaatgaaaaaggataaattctcagaaaaaatagaagtcataaaatcaaactaaatataaatacaaataaaataaatgaaaaatttaaaaatacctctctggagagactcaagaacaagtaactatgaaactaaaatccacgcattagagaagacacttaacactgttaactagagaagcacaaaccatagttatcacagcccagcagggcgagcaatcagtctgctcagaagtgagaggcctgaaaaaaaactcctggtgtccctgatggtgaaatctggcccctgatcccagggttcctccctcttcgtgctcagagggctagacctagcagtgaagggttcccaacctcaccctatgcggcccctccagaaggcagagcccattcttgctgatattcccgatctccaataacacaaagtgaaagagaatgtcttaaccagagtactgagtcttggcctatctgaacatatttcaaagtttaaatgtacagtgagcataggatgctgagcagaggccccctggacagtggctggagttgggagcagtgcaggatggaaggacaggtcaggggccctgagcacctgtacctgcacctgcacctgcccagggtggacatgactcccgcatccaccagagggcgttgtggtctaagcaactaatcagagctccccagatcctctgctgttttccctccacctgctggtgtttctgtgccctccagatggtgttgctcctcccccttctatgaccacttttcagccataaccttgtctgaggtcaaaggagggggttgtgcaaccttcagaaagggagaaatttgcatggagccctaccactctgaggatacgcgtgacagataagaagggctggtgggatcagtcctggtggtagctcaggaagcagagcctggagcatctccactatggcctgggctccactacttctcaccctcctcgctcactgcacaggtggctgcctgcaaggaattcagggagcgttcctggatgtcacctgggctgatgatctgttcctcctgcctgggaaccagtcttcatctctcccgactgatctctgtgttgctctcttcttgcaggttcttgggccaattttatgctgactcagccccactctgtgtcggagtctccggggaagacggtaaccatctcctgcacccgcagcagtggcagcattgccagcaactatgtgcagtggtaccagcagcgcccgggcagttcccccaccactgtgatctatgaggataaccaaagaccctctggggtccctgatcggttctctggctccatcgacagctcctccaactctgcctccctcaccatctctggactgaagactgaggacgaggctgactactactgtcagtcttatgatagcagcaatcacacagtgctccagacccatggggaagtgagacagaaactccccagagcatctctacctgggccagtctcagcctgtctccaccagagagggtagctctcccatctctcctgtctaagtgcttgaggtgaactttgcttatgacttcctcttttccttttcaaaataccaatctgtttttccacaccttgatggctgattttctgatatgtgcacgatcaattgtgggataaatgtagtttataatcgggtctctgagccacaccatgattgatgttctggttggggctgccttgcacagtataagttattgacttgcatctctggcctctacccttagatactattaacaccctcccctcatttgtgacaacaagactgtcttgagacactgccacatgtcccatgcttggggacaaaatcagcccaggttgagatactcagttaaagagcatgtcttcagctactaagaagcttggctttgaaatgtgtttatgccattctgctgagcatgaggctggttttctaatttttgtttctggttcccatctatgagacaaaacaataacaccaaacttcaatgttttgatggttgaatggtttttccaagcaacaagaagtcagagattgtgctacttagaggtgtagaagccctaaccagatcctgtaacacagagtttagctctgactaggacagcacacaatgccttccatcaatctccaacccacagcccgcaggctgcatgcagcccagaaaggctttgaatgtggcccaacacaaatttgtaaactttcataaaacattatgatttttctgcaattttctatagctcaccagctattgatactaacagttagtatcagttttatgtgtgttccgagacaattcttcttccattgtggcccagggaaatcaaaagatgggacacccctgctttgcacttttgtacaatgcacatggaaatataatagagccttcttccttctaaggtcatgtgactcagccattgaaaggtggaagtgctgaaatgagctccatatgaacggaccttgaaaaattatgctcagtgaaaggaacaaatgcaaatatctagaaatgaaatgtctggaaatgactgtatttataacaaatgtccatgatacgtaaattcatggaggctgaaaagatcgagattatcctcaaaccttgtgataatttaggtgaaaaggatgatttcagaattggatagaaagtgatctacttcaaaaataagctggaaatgcctccacgaacagaggcgatgctttgcggaatcctaggtggagaagtgtatcaggtgcagatgaggtctttaagaatacttcttgttttgttttgtaaaattaaatatgaataagaacactgtgggccaggcgcggtggctcacgcctgtaatcccagcactttgggaggctgaggccggtggatcacgagatcaggagatcgagaccatcctggctaacacagtgaaaccctgtctctactaaaaatacaaaaaaattatccaggcgtggtggcaggcacctgtagtcccagctactcgggaggctgaggcaggagaatggcgtgaaccagggaggcggagcttgcagtgagctgagtttgcgccactgcactccagagcctggctgacagagcgagactccatctcaaaaaacaaaacaaaacaaaaaaacactgtgcttgctcgcttacctcctcctcaggtcatttcctgcagtctctaagaacagtccgcctggcttccccatctcctccctgagcgccagcatctggggcgtgaacagcacaatcaaggccacacctgtgagaccctcagtgcgtcagcagagctgtgtcctggtgatgtcaagggacacggggtcagcaggggacctgtgaggctgtctcagggggtgagcatgtctggccctgccagctgggaaggccctcaggaggttgaggggagctgagcacacagtgagctcactgagctgagatgggaagtgactgcagctgtcaggaccttcagggacactcagtctaggatcaggctctctcaccctgtggggcctggttcaggtcaactcctcatcctcctcttcttcctccagacaagagagacattgcctatggctgaggggtcctggaggtgatccgggtgcagggacttatttgaatgtaggaaattctctcccagtgagacctgtagagactaaaagagcgttaggaacattcactgttacggctggagtcttagggtgcagatctcttgagcacctgcaccatggcttggcccctctgctttttgacctcttccctccctgcccagctgaggcacatcctgctctggggagaagggtctatgcggtcctcagcccacctctgctccactccctttctcacagggctcattgttttctctttctctccaccctcctgggtctgtggtccacatggcactgacagcctctttcactgaccaagcctccgggactgacaattacaatcacccaccctggaaacagccataatactgtcaatcaaggcacagcttggattcaggagcacctgggacatgtccccaaacctcagacccagagggggtaacaaccatccctcagggacctcagggaatttcccagccccatgttaggcagtttggcctccctggccatctctgggctccaggctggcgacggtgctgattttcactatttagcacagaatggcagcctcgctgattattctctgattatctggatgctctgtgactccttctgtgcatctctgggatcatcattcagactcacctgcaccctgagcagtaacatcaatgttgtttgctatgacatttactggaaacatgacagggcagggagccttccctccctggtatctactgagattctactgagattcaagcagaaccagggctcagggtccccagcctcttctccgtgtgagtgggtgccgtcgccagtgctgaggctttccatatctttggtctcaagcttgaggatgaggctactcatggcacagtagtgcctctcacagtgccatggatgggatgttctctctaaaatagaagtctttttttttttttagtttggcccctttgataagtagattctataataattaaagaaaaaaagtaatgtcttttttggagagtagaaacactggtgaaagagaaaccgggaaggacttggcatggggggtgggtgggcttcaggccacggctctgacccccacgaaaggagagaaggaagggggattagtaggaactgccccagcccacaggcaggtcagacctcagacaaagcctcagccaactgagtgggttctttcccacgggtgcccattacaagtgccctgcttcctgcaggaagacctgcctggagggaccctggggtccccattgcctggagccagcccacgggcaggggacatgttagtcacttgtggtcctcctgcacgttctcccaaagaggcatctgagtgggacacttccacagccgccaccagcactgctgctgcattccccctcaggacaggggcagtgccttccttccccggctcatctacctgagccccatgtgaagtcaaagcttaggtgtctcagggctttcctccaacaggccctgcagccactgagacccttatataccctgagctgcatgctgtggagagagggtctgtggaagaccttggctcttagccatcgactcctctggggaacaccatgaaatcctcagactggggatgtcctctggagccatctttatcctcttcttcttcccagtatctcctgctccatgatctgggtcctgtccctggccctgttgcatctccagtgtctgatccatgccagcccttccttaaatatgtgttgaacccatttcccatttgcccaagaaatgagtgctggcaatgagctgcactttttttttttctaaatgggaaatgggtcaataaatgaatgaatgaatgaataacaacgcaacctgagtctcctgtcacatggttattttaagacctgcgtttttctttacccaggaggaaaatgagtacctgcagccgttattgcctctgaattgagctaacttgtttctacactgtcatgccatggtcacagtgggacagatgtacaccaagcctaccatagctttcagccctgcccttccacccgccccacctgtggcagtgatggcatcaaggcttccctcagagtcggcctctacccaccacacactctgggccatctcctgctctccaacagcctggggttcagtgatccctgtccatgtgttctacctcagagacacctgccactcctccccttccctaatttctctgccatcctgtttctccagcctcccaggaatgtcccctgcccaatctcatgtctcaggttctagaacttgtcctggaacttccccagagctgagtctctaataggagagctgatgacaggcacagccgtggtcaagccctctagccagcagatggaggagaatcagcctgagggccctgtgcatcctccctgctgcacacctgggcccatagccccctccaccctccatatgctcctgcagcccccacctcagtgtctgcctcagtgtctcctcccagcaccttcctcaggaagggcctgagatcttgcatggtgtgtttccccttggtgaactcctagtcacagcagcatcccgagtaagagcctcctggtgaagagatcgtcttggtgctccaccctggcattgtgtcctcagctccagggcaggtcacacgctttcctggaccaagattacatgcaggccacccctgctggcccctgccccacagagggaggcccggggtcaggggtggcaccaagaccacagctccattgatccctgtaggaattcttcctgcatgtttgaaagacaagagttacagaaacaaagcagagggaagattctgggtcattgcaaaaggagaaatttgcctgcagaccagcaggggacgcggtgagaccttctctgtgtatttctgcaggacaggtgctcacagctggggagccctcaactgacagaggcccagggctgctccttcatttcctcctgggactctgcagccttgtcccatctgtgcctggcagagtcctctacacatgaccctgtgtgtggtcccagcagctgctgctttctctggtcccacccgtggggcaaactcttgcttcatgccagcctccctgtccaagggcctggtccctgcgagtgcacctgggggagaggcaatggggaaacacatttgcatggtcagcccctcctctgtgagcccagtgacgctgggataagagaggcctggggcagcccacccctaggtctgtggcctcagaggcagctgtgtccactatggccctgactcctctcctcctcctgctcctctctcactgcacaggtagggacagggctcagagcccagggtggtccccagcctgatctgtccctcatggctcagatccctcagcagctgcgccctgaccctgctcctcactgtgctgtgtctgtgtctgcaggttccctctcccggcccgtgctgactcagccgccctctctgtctgcatccccgggagcaacagccagactcccctgcaccctgagcagtgacctcagtgttggtggtaaaaacatgttctggtaccagcagaagccagggagctctcccaggttattcctgtatcactactcagactcagacaagcagctgggacctggggtccccagtcgagtctctggctccaaggagacctcaagtaacacagcgtttttgctcatctctgggctccagcctgaggacgaggccgattattactgccaggtgtacgaaagtagtgctaatcacagtgagacagatgaggaagtcggacaaaaaccaaggttttaagcttgtcatttttactgaactggttaagaacttcagtggttaataaaatcacattaaatacaggattgttgttaaaaatggtggcacattataactctctcccatttttttcacataatgcccatagtgactctaagcagctaaaatcaaaacacaaaaacttataccaatactaagaaatactaacattactaaccaatttccactagtaaaagagttgtgaaacagctgaaatacatccagatggcataatacataataccactatatacaagagttgtataaaattatgtatcatgtatatataaaattatgtatcatgtatatgtataatatatgaaataaaatgtcagcagacattaccgtcttcccaccagtagccagcaattctgccctgcctctagaataaatggttaccacgggttgaataggcgaacagccctggcagctctgcaggatgactctcactgtttgttattgttttatttttaagattgcttttctttcctattttttttgaggcagagtcttgctgtcagccaggctggagtgcagtggagtgagctcggctcactgcaacctaagcctccctggttcaaacgattctcctgcctcagcctcctgagtagctgggattacaggcgtgcgccaccatgcctggctaaagtttttgtattttttagtagagacagggtttcaccatgttggtcaggctggtctggaactcctgacttcgggatccgccgtcctcggcctcccaaagtgctgggattacaggcgtgaaccaccgtgcccgacctcttttttttttttttttagtttggttttgttagtttagttttgttttatctctttaacttgacagtcagagatgatccatgtggatctctgcatgggtctgggagctgcaaggctcctggtgcatggcccggtcccgcctgccttggcagggctcctccacctggctcctggaggagcagctgcgcccgactaccctgcatggagcccgcggcttagcggcagctcgggaggggcctgatagaaacttccccctgagcaagcagcgccaaacccaggccgccacccaggatggaggctgcatcacccccggggagcccggatcctcgccagggtccaccaggagaagagcacatggcggagatgagcctgcggggctgggagagagagaagacacggcgaagctgcaggtgaagacgctgcactaaggccccacccagaggctgaggttccccgaccagaccagcagcagcgaggctgcccagagcggcgccagcaaggtggttctctccaggtcggatcacaggagaagctagccttgcacctggcccaggcaagaagcaggacatgggcttacgcagaagaatcagcaccgattccacatcattccccatggcaacggcctctacggtgctgtcagcaagacccagtgctagacccgagcctgcaccaggagctgcggagcggagggtgcgccccatcccgatcgtctccaccactttagctccctgggtgagggtgacacggggaagcttattatcgcggctgcccaaaacggggcgtggctgggtaccctgtgtacatagggtagatgctgaatgtgaatagcactgaactactagagggaggctggagaggcccacagtgtctatctaccatgattcattatttgggcccagaggattgcctaaggcctagtatttggctcagttggctcagtaacgggcactaggatgcagtatttgatcactcctatcctaaccaagtacgacaactggtgcaaacagactcaaaagcaaaggcaacgcaatgaataacttgctcactctggggccacatatgctgaataaaatgcctacccttgaaatgtctgaaaaccttacaccctgggaaaattgcatacagaacttgtgcttggagaatgacatgaactctaatcagggtaataacacttgtaaagttcctaacagcttttctttccttttttttttttgtttttgagatggagtttcgcagtgttgcccaggctggagtgcagtggcgcgacctcggctcactgcaagctccgcctcctgggttcacgccattcccctgcctcagcctcccgagtagctgggaccacgggcgcccaccaccacgcccggctaattttttgtatttttagtagagacggggtttcacggtgttagccaggatggtctcaatctcctgacctcgtgatccacccgcctcggcctcctacagcgctgggattacaggcgtgagccaccgcagctggcacttcctaatagcttttctgtgagtgtaacgccataatcatcttttaaaatgttttctcggaactaaaagttgctgggcgcctaaatgatgttgcatgatagttttgggtgattttactgcatctgtaattttctgtttaagtgagcaccgcttaatttgaaagctaatttctcacagtgtaaatctgttcattcctggtagtctattttctacaaaagtgtatttttacacaacattaaaaaatggtgtaccttcatctatgacagtacattacttttgacaagcagctttcaggcagaaattaagagaagtgttttatataaaatttattattttgaacagagtttgtgatttggtagttacgctgttgaaatttgaattttacaattcttagaaacttatattgatgcattcttgttaccaaatgattggcccattacattttgatacaaatagatttgttgttttggaaccattatttgtttagaaatggtcaatcttttagagagaaatacttaacaaaggattgtgggaagttttttttttcttcttctttaacggattgtaccaggtcttacttgaatgaaagtctgatgcttgctgatggcagagtgactaatctgcactagattgatgtttagagcagaatgttgggtgatctcaattgtttttatttatgtttgtgattttgttttaaggtaatcttaacatggtataagactctgtgacaagctaaacctactgcaatatagcatgttggagtcccctaagagttttaaaagctaatggcataaatgcctggagccaacctcggcagttatttcatagcagaagataccgtcttaatattccttttaaattcttttaaaaggcaaaataggatcatcctattttataatgtacaaatgtctgcagagattgtatggtttgttgtgttaatgtttcccacctaaaatctatcatattgccactttgcctaattgtagtcacatttattaagtaatgcagtttgtactttttattttgtaacattctgtgatttttgtacaacattgtatttgtacaatacagcaattcccagttgattgaatgaataaataaaatgtaaaatcatactttataaaaagatctatgtggctgatagaattctgacattcccctccaaatggaaagtgatgtgtttctttaaagtaaaggtagaggagtcttaaatataggtgttcctgcccctattgagaggttttcaaaacatgctcttaatttaacgtttaaatataccagagtcttagaatgtgagaataatgaaattggtttgttttaattttgtgataatattaaatctactggaaagaatattctcctttgaaaagattctcagctcagtgatcatagaacctgtacttgcgtttaattcaatgaggaaagacatagaaatgccacgttaatatcctcatttaggtggtttctcccttcactgatcagcctatgaatgtgtcaatgcagtactccccagtttaggcttaggtacttattgaaaggatgctgcctgagcatttttaataattgctatttcaagatcacattttggccatgaggcaggctgccactcactttaggctctgcctaggcaggaatgggtcctggaagacacatgttctctctctctctctctctctttcacacacacacacacacacacacacacacacacacacacacacacccctctcttctctctgggtacacattattctggacatcttcagtttccaggattctctatgtctccagctagaagtcagggcttagcctgtggtgatccagccaccctcaggttgaatctcgatgaagtcacaggaaccaccagtggcatggagggtaagggatcctgctatcaggttcagccaggaaatgctctggacacctgctggtggaagagtttaatgctgggcaatcacaagtcaggtcccttcttccagtcggcagttcagcctccctgactttctctgggttccagtcagtgcatgaggatgatggtgacatttattcaggggcagcacagcagcctcagtcaccaccaacagtcactgtcatatgagaaaattagatagaaattggccttccaactcttctgtcagatccatctttgccctttttctgcctgcttgagtgaatacgaccaagaccagctcaggtttttgctgatgctatcacacgtgctcctaaaaccagaaggcttaatggtattttctgtttatctttacggattcaatgaaaagacaccttttcttactggtctcccaatgaaaacataatcactatgtccacagtaacaaagatagccctcgttgttgtctgctgggatgagaagagcagcagaagtttggcaggtatggccctcatgggcttcacatgtccctacatctggccctggctttgctgatcaccctttgggctctgaacccacagggaagttaggtttctctttcttttgagattgcctctggaagagctgctctgttcccaggtgcagggcagcccctccgcagtaaggacccagctctcagagccatgaaggcctcaagcctccaggttgactccacatttctagtgcttgtctctggttctttggttggaaagatgttggatgaatagaagttctctgagacctaggctttgtgaatccaacccccattaaatccagggatctttttaacgaataaaatgaatcagggcccagtgatggtggggaaatgggacgtgagggttcctcaggccagtagtatggggagaacatccaaaaagaaaggaggggttccacttttgagaattgtctttttatatccatccacatattgacgaaaattataaaattagactaaaataccttaaatatataacatggtcaaaagaaaagaggtattaccaggataatattaaatagtaaaagaagtcagaggcgaaacagagcaagagacactttttttctgacagcatcattcttatgggctataatgccaaggcttgtgcagtaggagctgaaggaatctcacaggcgaccctcacgacaataatgacaataacaaaataagtcaacctctaaaagaagcccatgtagaattatccccaggtatgaaccacctggaggctcagcagaacattaagccttagattgggttcaagatgaccacagactggtgatgaccacaggcccctgggagcaacacactcacacgcctggtgatgctgatatctggtaaatcatcactgtgcatcctgaaacacattctgtgattagctctttgcagaccataactaacatgaaagaaataatgcctcagctgtaaacactgcagagaggacccactcattctactcccttaggtcatgagttgaaagatccatttgcaatggtcaggatgtccttccagaagagctgggtctgttctgaggggccacccgacttgggatcggagcccagcagggggtgctgttggactgttcctgagagggcagggctctgggccaggccacataggaaaatactggttctcatacacttgagcaagcagtgtcctcactgaagtatgacttcctgcacctgcaccaccgagcaggagccacttcctgcacctcaggagccactgagcactagactcacacgccaatgcttcctattttatcctccgccctcatggagtccttgtccaagcctgcccttcaagcagagacaaatcacacagcaggaacaaatttgctcaaaggaacttgaactacaatgtttcctgggcacagaatgagaaacacttggaattggggaagttcccatcctaacaacttagactcaggaagaagaaccctggagcttctccagcatggccagaatctcagtccacttcaaaatcctcagtctttagatcaggagttcttttagggatgaggtcaaggtttctgggtgcacattaccactgcctttcagtcctatcatctgggcatgaggagcttgttatctcgttctatccattatttctaaacctccttgtagagggctgggttagagagtgctaactgccatttatacagtctggacctttgtataaaattataaacacacacacatacacacacacacacaaacacaaacacacatacttattttgatgttccagcgaaagagtaaaactaaactcaacagaaacagaaacagatttgaataatacaagacaatctcattaatgaacatagaagcaaaactctctcagaatattagcaattagagtccattttatatcaatgaaggattatcttgagcatctgggaggatgtgggttgagacatttgcacagtcattggaagacagtgaacatgatttttgaaaaaacagcatgtttagagatatcaaccagaggtcagatgcttcaatcagagaaagatcctctgagttctcagggctgcttccctgaaaagctacgggagaaggaaatggagtgactggacacaatgccaggggattcattgaccctttggcttcccatgggcagcatgcatcagcatggtcttacaaggatgaaaaagggcatccctcaaaaaagaccgaccatttccccagaaattaataaagaaatatcatggccgggcgtggtggctcacgcctgtaataccagcactttgggaggtgggcggatcaggaggtcaggagatcgagaccatcttggctaacacagtgaaatcccatctctactaaaaatacaaaaaattagctgggtgcggtggcaggcgcctgcaatcccagctactcaggaggctgaggcaggagaatggtgtgaacccaggaggcggagcttgcagtgagcctagatagcaccattgcagtccggcctgggcgaaagagcgagactgtctcaaaaaaaaaaaaaaaaaaaaaaaaatcacagtattttcaccagtgcatttctgtttgagcgaatatgttgggtgaagaaatatataatatatacttttctaaatgaaatttttatctcacaaaattgtagaattaaatttttgttttggataagaaatcaagaaacaatcacacacattcttatgatctcatgaaaaccaggtataggaaaggaagtgacgaccccaaaattcatctaaaaagtgaaggttttggttcaaagataagagggttgtcatgttcaagacaaagtcactaccattcgtggtatttaaagctgttggtacaagtgcctatcattgccgattcccttcaaatttcttgtgtatgtttggatcttaaacatgagcacacacaaaaagagaaacagcaaaactagaaaacagatttacctttttgagtttccaactggaggagaaaatgaacaaagagtaagaatatcacatgataatgggaggaggagtgttaggaaggtgatgaggagcagttcagccttcccagcttggggacagtcttagtggagcagagaaacctccttcctgctgccacctgactctctagagtagatgaagaataaataactaaacataaaaagcccttaggaaaaagattgtcatgatgtcagtgctattaatagttcagttaataattctgtaagaatatgcaaaaacttactggctttttaaaaatttttatttatttatttcttttgagacggagtctcgccctgtcgcccaggttggagtgcagtggcgcgatctcggctcactgcaagttccgcctccagggttcaggccaacttactggcttttatatttggaatcacaacctgaaaggctgcagaacatgaaaggaagaaaactcagattgcagtgttcattctcttttatattatgagtttcctgcaagagctacatctgttattatgcaaaaacaaacagataaggaaacaagaattatccagcctcaagagtggaataaaacatgcactttttttgcttgtaggcataggtgagtaattcagacacggctgctgtgggtgactcatttccccttatgatggagcctcagcaaaaaagcttcacagattggggctgatttggtatgaaggggttggaatcgactgaaggtgacctcattgagagtctgcagtgaagccggccttggctgaatgacctacctgaggcctcccatgtggcctgggtttccaggaagctgggcagtcccagagaattcagagctctgacttggtttataaagtgtcacttccacagaaactgtcagtgccgagagatcactagtgccagatctggttaacagggaggggcctgatctcacccctcaacggaaggtgacgggaaaacaaaggaaaagctgtcttcacatcaacatgggcagataccactttaaagcatattctgtagcagggttcccactccagaagctgtggtacaggatgtgtctcctatggcatgggccaagggagggtaaaggtgagtttgacatctgtctcagtcaccatgaggtttttctgacaactaaatataaatatgtaaggtgtctcacagcacaatcatgtgacaataaatgcagtgcgtgccttcaatattgctctatcaaggaggctttccctccactccaggtgtgagcacgtggcttgcatgtccctccactccaggtgtgagcacgtggcttgcatgtccctccactccaggtgtgagcacgtggcttgcatgcccctccagcttcctgcactgtggtcatactgctgctgcctcattctcagcctgagcatccctacacaggcacaaactctatggctcaggctggtcatcactctgggtccacagtagctggtcagagagaaactgtcttcagccctgcccagcaggagaaaagagcattccagactgatcagctgggttcctgccatccagaagtccttgtctgtctggaggctcaaaacatgactgtgattcctttgaggactcctcccatacccaggctgtgggcttcgctgccctcctcaggacccgtgcagcctgttctatccctgcctcagctgcaggcaaagctgcttgccacaagctccctgctcataggatgccggagtcctcccaagggctgctcttcctggagaagaaggagaaccaggcagtaaggtctacctgagcatcatgggaaggaagtgatccgattctgactccggtgggcgcacacccttggtgctttgtgtctcctgctatcccagccacaggagtgggggaaatgtgtgagttgtagtcctagccgggaataatccataaaaggtgaaggtgagagaaggacactatgcatggtgtcaccttgttttcctcgttgtttcagcggcctgagtcctgtgtttcctgaaagatctgtggctcgaggtgacacgccctatcaggggacaggaatcaaagaggagaatctctgatggaaaaattcacaaaggaagagggagataaaaattgggcaacatgctcagggtgagaacgatggctttttgtccttgtgatagtttgctgagaatgatggttttcagcttcatccatgtccctacaaaggacatgaactcataattttttatgggcaaggacaaacaaccaaacaccgcatgttctcactcataggtgggaatcgaacaatgagaacacatggacacaggaaggaggacatcacacaccggggcctgttgtggggttgggggagtggggagggatagcattaggaaatacacctaatgtaaatgatgagttaatgggtgcagcacaccaacatggcacatgtatacatatgtaacaaacctgcacgttgtgcacgtgtaccctaaaacttaaagtaaaataaaaaaaaaaagacggctttgtgtcaagggctatttatttagtgtctctcgttcccattattaaataatttaacaacaaaaattgccttttctatgaattttcaggaaattctaaccatcattcctttattaaatatctagatatgtacatctacacatatgcatatacatgtgcatatatagacatatattatattatatatatttgtgtgtatgcatgtgtgtatatatttatatatatatacatgcatgtgtatatacacacacaaagacaaattaagaaatatgggaatatagtatacttctttaatttcttaataatgtccatttatatctaaaaaaaagatacccctaaggttgaaccactagaatcattttatttttaatgtggaacaatagaaagcttatggcccataaagatattggataacatatttttctagcaatatgagaaataagcaaaagtgtaaaacatttaaatacaataatttaattcaaaaatatgaaataatttgtattttttagttgctatgtttatctaccaagaaggcattatattattctgatgttcttacacattgttgaattaaagcttgttaaatacaaatgttatcatatgtgcaaatagcatatcaacatttctttttctctcatatattttcagaaatcactttaaaatgtagcagttcataatgttgacaaaatatcaaaatctataaactctgggtttaaaaaacaatgaaatacacagtacacataagaaaatagtgtcaaagctcactactataagagacaatgatcaatattgaaattttctcttacatgaagacgctcaaaacattttagcagtgactagtgaggttgtatccattctcttatgtttatatttatgtttaaaatattgtccttgagaaggagtgtaggtaggtataagcagaggtggctgtgcggatccaagattctagcctgcccccttgatacagcccattaccctagtcccatccaatctcacacatggcccatcatcatcttctgacttgagcggggagagagacggtgggtagagagggaggaaaggagttagttcagagcataggagacgtggtcagagagttggcagagggagggagggaggcacattctgtgggttcacgtggtgctttgacaactgtggatttacttctgaatgaagcatgaagtcattgagagtgtggaacagtaaaatgatattgcaaaataaaataaactaagattccagtgagcatgttgggaatcacaaacactcacagctgggtgaataaacaagtgctgccatctggagaaaagttcctcagcacacaaggagaagtgtgtttgcctctgtcaagcagaagtccacctatacagagacacaaggaaatgtttataaagagatccttattcggagcaaagtattggaagcaacataggtgttcaacacaagtggaatttataacacaaggagaagataaaatgctagccagttggaagtaatacaacttcttatgcgacacgaataaaaatataattatcagttgaaaaacaataacaacaaactcccaccaaattaaacaaaatcaaaagctctcaagaaaaaaacaatgtgccacttattttaaagcagaaacatgcataacgaattcttcaagcttatataacgggctttttggaaagtagactggaggcacattatttcacataaatgggtgtcttaggaagagatggagacacgtataatggctaaaaaatgaaataaatccatagagaggtttttagtgtctagtgataaaagtactaataatattacgtaattaaattccaaaaaattaatacagaaaaatattcttgatttgggggtggtaacagatgattaagtaaagcgagtctacatgagctgctgatgcagtggatgacaagctctctgcagctcattgttagtgagaaggcactgctttgccagaaaccccttttatttagatttctcatggtccctgggtccctctccaacaccatgagcagcttcagaagaggatcaggataaccagtgactctctggctaccatggcccagttgtgtccgagaggtaagaaaggtttgggatcttggacagagtgggacagtgggagaaattcctgagatggccccaaccagcctggaaaccactcagaacctgcattgaagtttagccatcagggtgctcttgagactcggtttgggctgcaacacagacctgtggggacaggggtcaccataagccaggccacctccacccctgggtcagctcatctcctccctctctgcttcagatctttgagtaaccagcacatggaggcccgggaaaagtcagagagcaagatcttatttaaatgctgtgactccacccccatgaaggctttgggagctataaaaaagagacttaggggagcccagtctccaaacagagcttcagcaagcatagtgggaatctgcaccatgccctgggctctgctcctcctgaccctcctcactcactctgcaggtgagagtggaccttacccagggatctgcacccacctctgctccagcttctccactccctggctcagtggactctgatcctgctctcacattcctttctgtcccctctacagtgtcagtggtccaggcagggctgactcagccaccctcggtgtccaagggcttgagacagaccgccacactcacctgcactgggaacagcaacattgttggcaaccaaggagcagcttggctgcagcagcaccagggccaccctcccaaactcctatcctacaggaataacaaccggccctcagggatctcagagagattctctgcatccaggtcaggaaacacagcctccctgaccattactggactccagcctgaggacgaggctgactattactgctcagcattggacagcagcctcagtgctcacacagtgcctcaggccagtggggaagtgagataaaaactcaagagctccctcggcctcactgaacaggcctcacagagcactgtttaaactggaccacccaaaagacaagggatgcattcacaatagtgtacactatttaggactgttaaaaataggaacatgaagtgaaattagcaagcctgccttattaacaaatgtgtgtagggaacatcattgtttatatattagtagttacatatatataatactagtgcatgaacatacatatgcactagcaattagtaaaaaagaaacactaggtttaactaaggaaatatttattattccagagttttcttatccattccatttgaagatgctgggatcaagtcaccgagggtgctgctctctggccttgagaatccactcagcagggccaccagcagcccctcccttctgtggcctgctcatgccctgtcttctcattagaatccccttccctgctgtcacagggatccctggactcctccagatccaaatatgtccaatacatttggttgaggcctcctgggccccacattactgtgtaatctcaacacccacacactcaaaacagtgttcccatgcgtattcttctttcgactcatcactgtcctctaacagccatgggcagtgtgtggagagagcaggtgaagttggagctttggggtacagttgacagagatgttgacattttgagaaaaagaaaacacctatatagctgttttcaggataattttccatcaagataaaaatccacgcatgagagcatcactcttccagtgatgaatgcatggaggatccttctcactctattgttgggtagtgacacctgggaaacttactgtgttatttagtgtgcagacagctggtaaaccactcagctgactctagggaagttgaccaaacagtgtccccactgatgtgtgacttttctccacccatgaggccccactaccctgtcacctcctgagtccacctttcccattgcgttgctttagatttgaggcatctctctcttacctctttaaagtctttacccaagtctggttcaggaagtgctgatacacggtgagaacccagggtgcatatggatggagtgattctgtgcctaggagagcctggccaggggatccaacacagcttgtggccatcctccccgcagtggagcttctggagacagagctctgaggtgtccccaccacaccctggggcctttctccctcagttctttataaaagggatatttgtcatgggcttaggggaagaggccgctgaggtcacacaagacctgccttcttgctctggctcacaaggcacaagtgagctgtgaccctggactctgtgtcagtgctgtggtcacttggtcagaactaagggaagctggagaaatgtgggtagctttgatgcagtctggcaccagaagctccatcctgaagcactctgaaggtgctgatggctgttcactgtgctgcaccctgagcaggaggatgatcatcatcgcagacctagggtgacagcctcagagctgaaatattcctcctggccctgagaaaagtgggctaaagttctcccttctgcgtgtgttacccagtggtttgcccccctttcatcacctgtgaccaacatgggctcattggggatatttgtgctgtcatttctggcacaagaacccaaagatctaagaccataaaatgcatttggtctttcatactgtctattcccatcagggcagacatctatccattaatacattttatttaattttcttgtcttatattttcagagcaatgatgagtaatgagtgaggtaaggggtacctttgcatttttttgatctcagggaaaatgtcctccatgcagtaagatgatgactccggaccaagacaggtgtgtgtgtgtgtgtgtgtgtgtgcgcgcgcgcgcgcgtgcgcgtgcacacgtgcacacgcatgtgtgttaccatatcataaacaaatttatctgtttctgtattcttacgtgatttttattagggatagatattaaaatttgccaaacacattaaaaatctattgatacaatatgatctttggttgtgatgtaataatatggtattataccaaaacttttattaatgttgaacccaaccattattttaagtataaatcccacttgacaatggtgtataaatgcgtaaatctggtgttgaaatcagttcgttcctcaaatttcctggttcaagtgatcctcccacctcagctccttgagtagccgggattccaagtgggtgtcaccatgcctggctaattaaaaacaaatcttatttgtctcaacatattgcccagtctggtctcgaactcctgggcacaagcgatcctcctgcctcagcctcccagaatgagttaacattttattttaaaattttgcattaatatgtttattttattttttatttttaaaatttttaacttttattttaaattcaggtggtacatgtgcaggtttgttacaagggtatattgtgtgatgttgaagtatacaattttatctttttaaattgctcttaatacatatttttaatttaaatttcaacttttattttaaatatagcaggtacacgcgcaggtttgttacatgggtgtattgcacccgggttgtgagcattgtacccaacaggtagttttttacaccattccctcctctccctccccctcctagcagtgcccagtgtctattgttctcatgtttatgccatgcgtgctcaatgtttatctcccacttaaaaatgagaacacgtggtatttggctttctgtccctgtgttagttgcctaggattatgtccccctgctgcatccatgttgcttcaaaggacattattttattcctttttatggatgcatagtattccatggggtatataaactatattttctttatccaacccaccactgacgggcacctaggttgatcccatgtctttggtattgtgaatagtgtggtggtgaatatacaagtgcatgtggcctttgggtataatgatctatttgtctttggatagataccctgtaatgggattgctgggtcaaatggtagctctgttttaagttctttgagaagtcttcaaactgctttccacaatgcctgaaatacggtgtatacgtgttttctttactctacagcctcaccatcagctgttgtttttttactctaattatagccattctgactggtgtgacatggcgtctcattgtggttttgatttgcatatcttgatgattagtgatgatgagcatttctccacagttttgttggccactaatatagtgcagttttaagttcatagcaaaatacagaagaaggtagaaagatattccctatcctccctggctccacacatgtccagccttcccccttatcaacgggtcccatcagaaatgtacatgtcctgtaattgatgaaccacattgacaggtcattatcactacaagtcagtattttccttaaggaatttttctcgctgatgcacatcctatggctatgggtttgtgcaaatatataatgacatatatccaccattacagtatcatgcagtgtatttcccttccctacaaatcttctggctttactgattcatctctctctctcccctaacctttggaagtcgatgacttttctacttttttcctttgtttgactgtaatacacttgaaattatttccccctttttggactgtaatatacttggaatcacgtatcatgtcatttgcaggtcagctccttttacttactaataagcatttaagtttcttccatgtcttttcgtggtttgatagtgtgttgtccataaacatgtagaatatattaatataaagtactttggagctgatcacatcactggccattcaggtttttcaattactgtttgttgaatgacagtgaccagtcagatgacaggaagtcttagaccccctgagaacacagaagatggactgaggatgtcagggtcaccgaggactgcactgggtgctctcatggagggctcagtaggggtgtcctctagttccagtgagcctggactgtgatgggcactcagagaagggtcctctctagcctagcagagcccctgctcacaggcctaccagctgtcccagcagctttccctcccaggtccttccgtggggcagacagagtctcactgcctgttagcccttcctacccacaagaccctcagcaaaagatccttattcagtgctcagggagaggtggggcagatagcagctggggccacacctgcatgaccagctcctcctcgctgaggcctacagcaggtaataaactcaatccatcccactggaccaaagggagctgtgtctaccatggcctggacccctctcgtgcttgtcctcactccctgcacatgtagggaaaaggcctagagacctggggcagttcccagcttgtgtcagcccctctggctcagacttgccaacagcttaaccctgacacctgctccaacaatgtaaatgtttgcatttccaggttccctcttccaggctgggctgacccaggtgtcctcactcccagcatcttcatgcagatcaaacactcacctgcactcagagcatatcggctttcatatcggtggcaaaaataccttcttttccctacagaatccagggagccctccaactatgttctgagattatgctcaggctaaaatgagtaccaggcctctggggtccccagacaattctctgggttgagaggctcctccagagtctcaagttatttggtcgtctctggccttcaccttgaggatggagcagatcatctctctcagatgggctgacagggcatggcttacactgtgctctaggccaatgggaaaatcccctctgcttgtgctgcctgggctcccactaggcccctgctgtttgtgacaacagccagcactggtggtgacgcttcagccatgtatgccctacggtgagagtctgcagcccttccacgcaactatcacttgcagaatgtctgcatcattgctaatagcacattctgagcctcctcacgtttctgtgggcaacaatttccttcccaagacgtgcacatgatacaggagatttatttaccaaataagtttattaggaatccaattataattagaagatattcatcagtgatcgggggaaatacctggtataattaaaatagaatttgatgaaaatataaataaagaactaaattatgaaggtgtgggcagagagtctggacaccctaagggagatggaaaaccattcatccttgccaggaatgaatgtctctgggatgcttctctaacaggaggaacctggagtgagaccaggaacctggagaactagcagctgggtgactggaaaggaaaccatctggggtggggttgggtctgcaaggcaggaggtgtctgggcagagaaagcagggctggggcggagggtcctgcctcatcccattctcctgctcactccttcctagatccctgtcagggcagtaaccatgagcaaggcttgaggctacttcttataaactgtggccctgggcacattccttagctcacctgagcctcagtttcttgatgagaaaaaatcgggacaatagcaaccaacctatctcagagggctgctgtgagaccctgagccactgtttctcaaactgcccctgagatcacctacaacagaatggctgtagggtgaagtttgagaaccgcagtataggtgaggtggtgcgtggggcaggccctcccacactgtaaagtgcagtgtggtgcggtaaaagctgatattcccgcaggcatcctcagagtgggcccaattagactcttgagcactgattccattcaaggtctgcggcttagagaggatggcaaagtgaggcaccaccaggagcttgtccctatgggctccaggccaaggacgtgcctggagatgactcctgccttgtggcgctgtcactgcctcactgtccacattccatcacgcctcagatcctggcttccaccctggtgaaaggaatctttcaatatcacccacccagccacagacgcttctctgcttctctggcaaggctgcaccccctggctaggtgggcagggccaggggctccttgagacagtctgcagccactgagctctccagcctccagggcagaggtacagtcccatggagcgtggctgatctgaaggcagttctggcctaaaaggggtcttgtcccttcctcgtcctcattgctcccaaggccaggttggcagcagtagcagcggggttggatgctattggatgggagaaggtgaatggactcggagtgcagaatcaagctgcggaagccaagggccttgaaggagggtcacacacaagggacaactgcagaggaaaataaaggaacactttgtgattagccctgcctgtggctgaaagcgcagtgcagaagcatagtaaggaaggactgggtggtctgggtttaagacctaggaaccgtctctgctcctccaagcctgaatgagccctataacctaagggtcctggaggtcttgaaaccttctgcggagaaggctccaggtccactgggccctgtgggtggaagagcagagtcacagccccgcactggggacctaacaggtgtggccttgctagggccccagaatgggaccagagtgggtgggagggggcagaagctctgagagcaccccctccttcctgaagcctgtgcttctgagacacatcccaggaccctctatgtggttccccatgtctctgtattttcattcagcttcgagtagctctccaaactgtgttccagggaacccccgtgttaacctgtgagggcctccaggaagggggtccaggtggggtatgcttggtgggctctgggtttccttacaggagctctcatataagtcctggtgcagcctgggaatctactactgagttggggcgggggcgggtctgagtccgaaacattcctgacctgcccctcaaagaaaggtcccactgaacagtctggaaagctgttttgctgagctcccgtcatcactcaatgaggcacgggcggagtgtggagggagtttccaacacacagtggatcccgcacaggtgtctctcctcgggtggctggggaggggagcacaagaaggcactgaggtcagagggcagctgccaccagcacctggcaccacagggcagtctggcctacagggtattttctaaacctggcatgtgaatgggttccatggggcacccagctgcctctaagaccataaggccttgttgtgagaatgggaattgcagcaggtcctgggaagctgccagacgcacacgggcaccatgtacagggcttctcagagatgggagcagggagcaggggacggagaagcgtggggtcaagagcgtggccctgagcagggggctgcagcgaagaccaaggggattcataagccagatccagggagggggtctcccagccccacctgctccactaaactcctctcctgccggagccacagctgtcaaggccgccttccttaaggcatcagggccactgcttgtgcacacagctaccatcagcagcacggattgagatggggtgtgagtgcaaactgggtctattccccagggcttcagggttggggcatccctgcccgtactgccagggtgtagggatagcagggagcactctgggcacgtgtatgcaggctgaagggagacgtattgggtttcggagagggaaagagggccccacaggtgcccagggacacggtaacgctctgacatcgctgcaccagcaaaggggccccagctctggataagataaaatgcattttaatagtttgaagtgccatgaggtgtctgcatggcactgcagcctgggtgagggaggacagggtcatcatacaaagtaggcggccagggctgacatcttgtccttgggccgtctggggttgggcttcccagggggcctcctggcccggccccgccctcgaccctgccttctccctggtccaccgcggtgcatggggtggcaggaggccgcatgcttcagctccaccagctcctggaagacggggtcacaaaagacgcagcccatgtgctgcgcctcatcgcccgggagtggggacttggccttgttgaagtccacatcaagcaaggcggcctcacagacactgcaggtgtcggcggacacccgcacgcggtgggcgttctcgaagcagtgcgctaccacgttgcacttgttgcaggccaccttccacttggggcccgaggtggggtccagcaccagcaccccgctctcacattccacgcactggccgatgcccagcatgctcagcgagtgctggcaggaggggtgcgtacactcgttgcagcccatgcctggcgggagaagggagccctgtaaaggcacgcccactgtgcccacctgccctctgctgcctgctcccaatgcctcaagctcctggatccctcgtcccagcagaaggaactcttcttggccttgctcttggggacagccttgctcatgtttcggctcctggctgccattacccctgttttctgcttacctgaaacctcctcaactttcaaggcccctcgctggcgccatcccagtgggtttcagctgactccatcccccctttgctttgctgccagcttgttactggtaatgccacatgaccctcatgtcactgggccacatgggaccaccctgtcagctactctggcggcagcaggagggcagggatggggtctcactcccggggcagcctgggtgcagactgaggcctgagggggctttctgcagagcacacggtgaatgtgggcagatgcctcactcccgctgattcctggtctggctcggtgctctgtcctgcctgcctggacatgcgctccctcctccagtaatgaggacgaggatgaggatggaggacagtggtggacgctgactgggggtgcccgctcaccgggtgggtcccccgactgctgcatcctcttgctgactcagctccagagggagcactgcacacctgcgcccaggtcctgagggtggactagggttgcctgctcgattctgacacagagagagggtggcaccactggctgaggcctaagcagtgccccagctacatccagggtctctcgtctcagtgccaatgagtgcaggaaaggccagggtgaggggtcccctcagagtccagcctggtgcaaggcaggggttggcactgaacagagactgcagctacctgtggacaggagggagcggctgcactcaccttgatgctgctgttcaacaatggattgctgttgcgcctaaccaactttaagacttggtgggcttgacacaacttaccttgtgataggcagatgtgaatgtgtggtcaacaggtatcttatggtcctccgctagggccaacagcactgcagaagttgttttacaaaacacatgcaattcattactgcagactgcacttagccctgctaagtgcagggctggagggcctgtgctgtgattctcccactggagctcactgcaaattccacatggcatcttttcttaccaccgacccctccagtcccctaaattctgccgagtcttatggcccaagcagcagggctgttttcactgcagccttgtcaggcagcagatgacttttctacgccaggctgcattcaaaggtggcagccttctgtagaccaacgacataggccagaagtggaacatgctgttcccaaaacctgaagagttctgccaggcattatgtttggacgatctgacccatcctgccttgaccacttaggcactcaaaactgtactcacgtgacagttccctgaatcttcatacagattatctcctaccctttatagtgcatgtttcttatgaaggcctccaacatgctagccatttcctactaaactaactcaactagcatgatgtcaacaacacagtcaatcaatgggatattttgtggggtgctcagatggcagaatgctcccacatcaataaaactcacccttatctaatcttcatgttctggtccccctctatcacccaccctcatgatccagtcccatgcctagtcccttgactcctgctggtacctgctggttaggtcttatggctcctctggtgtgtagtcccttttcttccccttttaaaaaatgttttgagacagggtcttttctgtcccctagactggagtgcagtgtcatgatcatggctcactgcagctttgacctcctggggtcaagtgatcctcatgtctcagtctcctgagtagctgggactacatgtgtgagccgccaagcctggctaattaaaaaaaattttttttttttttttgtagaagtgaatgttccgctatgttgcccaggttggtctcaaactgctaggctcaagtgatcttcctgccccaaactcttaggctcaagtgatcctcctgattttccttatccccgtgagcctcctgaagtgctggggttacagatgtgaggcacctcacccagccttttctctcttctcaaaatgagcacatctcctgctgtgttgtgctgggacttaaccctagttctaggccaagagggaaattgggcaagatggtgaagaaggcatattttgtcctagtgagagaggcctctgcaaacaaaggagtttagctctgaataggctgagtttagtccacttctgcaggctcaggggattaaggaaaatcagtgacttaagattttagaggcctcaatccaaataactctatcaatatatatgagggtgttggccgggcacggtggctcacgcctgtaatctcagcactttgggaggccgaggtgggtaaatcacttgaggtcaggagtttgagaccagcctggtcaacataaagaaaccccgtctctactaaaaatacaaaaaaagaaaaaaaaaaaaacaaaaaaaaacaaccctggcggggcatggtggcacacacctgtagtcccagctacttgggaggctgagactcaagaatctcttgaacctgggaggaggcagaggctgcagtgagccgagatcgtgccactgtgctccagcctgggcaacagagcaagactctgtctcaaaaacaccaaaaaaaaaaaaaaaaaaagaaaagaaaaaaccctgacttttctccagcagtctggatcaatcaccccaaacagtccagtgacccctgatggttgagcagcagcactagaaccccaaatttctaggggagacccagcttccagtttattaagttccatgcacttaattcttgttctgcttgattttgggtcagcagttacatgaactcacgtgtttctcaaccagtgttctggagatctggctcagtgcagggctgtggtttcaaagttattcaagcaatgccaccaaaagcctgtaccccagaatacctgccataggccatcctgtctatccctggagacagtcccttcttattgaagatgaagcactttggcccgtagctggttgccagagctttcagaaaagcgtcggagtaaaacaaccatctctgatgacaaaagacttaaaatggctgtgaagagctctattaattcctcaaatattcattgctctattttttatctccttttataactcctactgccaggctattggcctttctacttctatcctctccccgacattcccatcttagtaaatgactccacaagtacttcagctcccattcaaggaccttggattacccttgggtcctctctcttactcaacagcccatcctatgccaagtctcaccaattcttctctctctctacacacacacatatacaaacttatttgtaaacaattattttaaaaaatctctcttctgaggttccagctttcttcttcttttatttttttgagactgagtctcgctttgtcacccaggctggaatgcagtgacacgatcttggctcactgcaatctctgcctcctggtttcaagtgattctcatgcctcagcctcctgaggagctgggactacaggcatgcatcaccacgcccagctaatttttttgtatttttagtaaagacaggatttcactatgttggcctggctggtctcaaactcctgacctcagataatctgcccaccttggcctccaaagtgctagtattacacgatgagccactgtccccagcctctctctcttttttttttttttttttttttgagacagggtcttactctgtcgcccaggctagagtgcagtggtatgatcttggcttactgcagccatgatctcccaggctcaggccatcccacctcagcctcctgactagctgggaccacaggcatgctccaccatgcccagctaatttgtgtattttttttgtagatacagggtttcactatgttgcccaggctggtgtcaggctcctaggctccagtgatacccccacctcggcatcccaaagtactgggattacaggggtgagccaccacacccagtcacagctttctttttagagttcaccacagtttgagtgattatttggaatttttaagtggcaaaaattacaacaatatatttgtaaatgaaagagaattgtgaaatgtatttgaaattttaactttaagattttctttaaaatacccatattgaatgaagagtatcaaagtaactattgcttaaaaaatggggcttcatttgggttaaaacacaagaatcatgaacatgatcaaaattcttcaaagtgcttgcttggaatgatacagagaggattagcaaatacaaatagtttttttttgtttgtttgttttttttttttttttttttttttttttttttaagagatgcggtctcactatgttgctcaggctggtttcaaactcctgagctaaagcaatcctcctgtcttggcctccccaagtgctaggattacaggcattgagtcaccactgctggccaagatgctgatctttttgttgttgttgttgttgcctaggctggagtgcagtggcctgatctcagctcaccacaacctccgcctcccagattcaagcaattctcctgcctcagcctcctaagtagctgggattacaggcatgcgccaccacgcccggctactttttgtgtatttagtagagaggggtttctccatgttgcccaggttggtcttgaactcctgacctcaggtgatccacctgcctcaggctcccaaagtgctggtattacaggcatgagccaccgcgcccagtgatgctaatcttatgaaagacaaccaacaacaaattctgaatactaaagtgtgcgaaatgtatttaattcttttcatagcacagatgagttaacccacgatgtgttgtcccaggcactatggagtcatcttgaatttcatgttctaaacaaacacccttggcctggaggaatgcacctgcatatcacgacaggacctagtgtctcagatttagtccggcagctttgaatttggaaatcctctttggagcttcttctgacacagcatcttttctctctgggaaggtaggtgacacctgagaacagaggcatggtgtggcatcagagatggaggtaagaattatttttctaccacaatcccaggaaaagactctcctgttcctggtgagggtgagagctctggctgaggatgtcctctttcttctttcttctccagaggatttttcagtctctctgcaaatggctgcttcacagccagggttcatcgaaacccctggatcgtcatggccagtggtttgcgtctctccagcgccactccatacgagggtctttctgcatcctgctctcatggtggacttctgagggccatgctcctcatttgcagggctcacaaatattctgtaaatatccaccagtgttctgataacggggtgacccaggacaaactgaccgtctccagggttcaggtcccaggcatgtctagctccctctttcctttcactgaaaactaatgtcctgtttttttccgtatctatatggacctttctgggttcagtggtgtgggaaaaatagattgttggtgaagactcatcttcatctcctgaactgccatcattgcagtgttcagagtggggatggtgcttggaatcattcccttgaccttgccttcgaccttgcattagttttgactttaaaatgtccttatgaaaattcccccaagtacggaagcccatagtctcatcagagatcccaccttttccctgttcccctccatttttttttcttttttgaaatggagtctcactctgttgcccaggctggagtgcagtggcgtgatctcggctcactgcaacctccacctcccaggttcaagcgattctcctgcctcagcctcccgagtagctgggactacaggtgcccgccaccatgcccggccaattttttttatttttagtagagacggggtttcaccatattggccaggctggtctcgaaattctgatgttgtgatctgtctgccttggcctcccaaagtgttgggattacaggcatgaggcactgcacccagccccttcccctctgtttgtgaactccatcccaggatcatggttgagttcacccagcaggttttcttgcctctccagttcttccagtcgagcccacagttcctcatttgtaagtaagcatccttggacttgagatcattttcaaaacctgaggttttggattttgaatcaggtttatgtgcaatccagggttttctctttaattcagacttgttttgaacatgttttcttaggtcaacaagatctccatccccatcaccccatccctgcagatctgctgtgaatgcaactttagattcaaagtttctcctggcttttgtaaagtcatgtagtgctttcctcacacactccttcctatgctccactaaccccactgcttgctttgcagagcactggcaaaaccagttgtccccgaggagaagagtgattttgctggtatccacaagccttcctggtatagaaggcaagaggcccagttggcaccatgagctcgtaagacagcctattgggcaaggtttggagtcgctcttggagggtattacagtccccctttaccttttgccagtgtgcaatttcatcttggcacctagagatcatcttttcctgttctccttggggcctcataacctgttgaggatgcagctgtttgaaggtggccgaggaggctgcacggtggggcacacggtggggctccatggctcctggttctgcgtgtgcgctgtggtcggcactgctcaggctgctgcccccagtcatggcgactgcagtgcccaacttcctccagctgagtcctcatgagatccttcctgcaatcagtgctcccagctcctcagtcccttcaaaagataaatcattccggagatgggcggtggtgatgtagcatgacaatgtggctactttcaatgctaccgaactgcataccaaaaaatggttaaaatgctgaattttatgttatgtatattttaccacattaaaaaaatattagctgggtacagtggctcacacttgtagtcccagcactttgggaggctgaggcaggaggattgcttttagtccaggcatttgagatcagcctgggcaacacagtgaaacccccatctctacaaaaaaactcacaaaattagctggccaagttgattgtgtgcctgtaatctcagcatctctggaggtggaggtcgggggattgcttgagcccaggagttcaaggcctcagtgtactgtaatcacaccactgcactccagcctgggtggcagagcgagatccagtctccaaaataataatagtaataaataatagtaataataataaataaataagtgataataaataaaaatatccacttgggataattatcacaagaactttgctgtcatggttgtgattttttggaacaaattctcatggttctaactaaaccaaatcaaatacaacattgatttgaacgcccatgctcacagcagccttattcacaaaaaccacaaggtagaagcaacccaaatgtccatcgacagatgaatggatcaacaagatgtggtctctccacacaattcagccttaaaaaggaaggaaattccaacacatgcgacaacatgcaggaactttgaagactttatatatactaagggtacccaccccctacctcactgtattcatatgttgaaatctcaacccccaagctgatggtattagggtatgggattattagattcaaagtttgggacataattaggtcatgagggtggagctcccatgatgggagttgtgaccttataaaagggattccagaggcccctcttaccccttctgccacgtaacaatacaacaggaagtcagaagtctgtgaatgaaagagggccctcaccagaacccaaccatgctagcccttcatcttggacttccagcctccagagccatgaggtatcaatgtctgttgtttataaaccacccagaccatggtactctgttatggcagcccgacctcactaagacactaatcaaaacaaaccggtccacaaaaggacaaacactgtatgattccacttacatgaggtacctagagtagtcaaattcctacagacagagtagaatggtggtttccaggggctgaggggagagggaaatggagagttgtttaatggcatggagttttagttttgccaaataaaaaagttctggattagttggacaacaatgtgaatgtacttcatgcttctgagctgtacacttaaaaacggttgcctgggcatggtggctcatgcctgtaatcctagcacattgggaggccagggcagaggactgcttgagccgaggagttcaagaccagcctgggcaacatagcaagactctgtctctacaaaacatttttaaaaaaattcaccaggtgtggtggtgcacacctgtagtcccagctacttgggagtctcaggtgggaggactgcttgagtctggatgttcgaggctgcagtgagctgtgatcacaccactgcactccagcctgggcaacacatagtgaagccgtatctttaaaaaaaacaatggtgagactgggtgcgttggctcacacctataatcccagcaccatgggaggctgaggtgggtggattgtttgagcccaggagtttgagaccagcctgggcaatgtagcaagaccctgtctccacaaaaagttagctgggcatgatggtgcatgtctgtggtcccagctacttgggaggctgaggtgaaaggattacttgagcctaaaagattgaggctgcagtgagctgtgattatgccactatactccagcctaggtggcagagtgagaccttgtctcaaaaaaaaaaaaaaatggataaggtggtaagttttatgttatgtgtattttatgttttttttattttttaaagaaacagggtcttgctatgttgcccaggctagagtgcaatggctattcacatgtgtgatcagagtgtactacagcttccaactcctcagctggagttgaggtgattctgcctcagcctcccgagtagctgagaccacaggtgtgcacagctttgcctggctccattttactacactacagtgtctctctttttacatggttgttgcagtaaaagaaaattcagtgtatatagaaacatcacaagcaattgttttaagattatatgtaaagtggaaataagttgtagactcatatagttgtcaataggttttctaacataagaactttgggtggggcacttgagaactgattcagatggaagatggctctaggctggtggaacagtgttgagaattcctgaatgtgtagtattcctagacctctgtccaccaaattaaagcaggtcccccatcaccatgatcctacagggggcatcccccttagtaacccatggaatctggcccggcctctttctctagcctaaattgagacattctcctccttgtttctctaggcctcagccacactggccttcttctatttccaaacacacaccaagctctctcctgaaacacagccttcccacacaccgcatctctgcctagttcatacactgccggcaaattgtgtattggggctgggcccttcccactgttcagctgtcatcctatttttttcctttgtcaggggtcctttgaaaactacgtattccagaccaggtgcctggacattctctcttatgacacttattaaaacatgttgttggctgggtgcggtggctcacgcctgtaatcccagcactttgggaggccgaggcaggtggattgcctgagctcaggagtttgagaccagctgggcaacatggtgaaaccccgtctctattaaaatataaaaaatcagccgggcatggcagtgtgtgcctgtagtcccagctactcgggaggctgaggcaggagaattgcttgaacctgggaggcggaggttgcagtgagctgagattgcaccactgcactgaagcctgggagactctgtctccaaaaaaaacaacaacaaaaccaaacaaaaccaaaacaaaagaataaaaaaaaatgttgttgtcattattttcccgctagactcccacaagattccccactagactctaagcttcatgggaggaggggctatgcacattcacagtgtctgctcttaccagagagtctcacagagcagccctaacaggttagaccaaagaacaggtcatataaaaacccaagttccaatttctcctgagatgtttttctcctaaaaaccaagttaagaactctaggcctctactgggaagctgcctccccattcagacagggtctccccattaccacaatcccttctagtcctctcttctacttgcctccctaggtgatcattgcaggcatctgagtttgtaaacccgagtttacaaaaggggattagagaaatgcccacatcaaatgatctcattcacccatttctcagattctaggtcctgatggttggcacatgttgcaatgagttggatggggggagtccagccaggacctcagggtagccacagacttcttcaatttccaccctctaaggtttggtcctcagattggaattatgtttcctcaattctctgcagacaggaagtgttgagatctgactcttagtagtaatttaaatgagagaaagagaggaggagggaggtatttttatatcctatttgtatctaaataccagaaaaggtagggagtgggggcttacacctgtaatcccgacactttgggaggccaagacgggagaatctcttgagcccaagagtttgagaatagcttgggcaacgtggcatgaccctatctctacaaaaaatacaaaaattagttggacatggtggcatgtggctgtagtcccagctatttgggaggctgacatgggaggattgttttagcctaggaggtcaaggctgcagttaactgtgattgtaccactgcactccagcctgggcgacagagcaagactgtctcaaaacaaacaaacaaataaacaaacaaacagaaaaacaaacaacccgggaaaatggtactttgggaacaaggaccttggtcaacccaattccttattgaaggaaataacgtatacagtggtccatttcttttttttttttttttgagacggagtctttctctgtcgccaggcttgagtgctgtggcgtgatctcggctcactgcaaccaccgactccctggttcaagcgattctcctgcctcagcctcccaagtagctgggattacaggcatgcaccaccatgcccagaacatttttgtatttttagtagagatggggtttcacaatgctggccaggatggtctcaaactcctgacctcgtgattcacctgcctcgacctcccaaagtgcgtgctgggattacaggtgtgagccactgcacccagcctacagtggtccgtttctaagacaaaatgctttgaattggcttaggtcagcaacctacagaagaaacatgatacactaggtccctgcttggatagccagccaatgcctgcttgtcagcctcccccttccccaccttcgccccttagttgccttcacctgaaccaaagtagtttagtctaagatgaaagtttactagcctgcaaaatagcttgttttgtctgttcttagcctgcccagctacttaggtcataagtctaacacttgaagagcccctaagctaactaagattacaatgcattgtgggctgcaacaaaatgcagcaaaacgaccctaaaataaacaaaaaacaaaaaactcctggcgctcccacccaacaatcaacaggcgagaagtttatgaccccgtagtactcagcctatgaggaactgggggagggacctgtgcactaggggataaactgcttgttgaaagtgtgctgggtgtgcctgtcagacacctgatcttgcaagactgtcattaaaagtctcactttcactgttctccgggtctccgagtccattctttgggttgggatgggcgagactgtttctcacattatgaaaagctgaaggttaagtgaacttggggaatactgcctcctgctggctggatgtcatggaagcctggcccatcagcagagaatgataagctggagttctggagggtctgatttccaaggaatcacccccttggaagctcctctaatacaccctgatgagattaacctgattaggtccattgtttgataaaaagaggaggaagtttaatcacttccacattctttgcccacgactaaccctgattggatttggggctatggttcaaatgtatgaccgattgatttttttcacttcttctgttggacttttgaaaaaaagttctctgaaaaggaatttagaggaaagagacttattccagtgaacagttacagtttgcaaacccaacagacacaacttttggtacaaaaggaagttacattccagagaacaaggggaggctttgtcttttctagagaaaattcccgctcagaatcccactcaggtctgcttatgcaaatgaaagattcaaactttttagttctgattacttggctctagctgggttctgattagtcaaagcaggtcacagtctactggtggcgtaaacaggaacaggcagctatgtaagtcccaaagtttttccagaaactcaaagtatgtgtgtgacctctggtcagcaaataaccacttgtctcaaatttaaattcaggcccaggattcatcttgaggaattggctctttcagggttcagagaccaatcaaaatgtctatcagaatggatgtgttaaaaggcaaataatgggcagggcatggtggctcaagcctgtaatcccagtactttgggaggccgaggcaggtggatcacctgagctcaggagttcgagaccagcctcgccaacgtgatgaaaccccgtctctactaaaaatacaaaaaaaattagctgggcgtggtggtgtgcgcctgtaatcccagctacttgggaagctgaggcagaagaatctcttgaaccctgggggcggaggttgcagtgagccaagatcatgccactgcactccagcctgggtgataagagcaagactctgtctaaaaaaaaaaaaaacagcaaataacgttgtcctgtgccatgagccacatactcaaatatttacacaggtccaggggaagtaaagagtaaatatggccaccaggcgcggtggctcacgcctgtaatcccagcactttggcggctgaggcgggtggatcacgaggtcaggagatcgagaccatcctggctaacacggtgaaaccccgtctctactaaaaaatacaaaaaaattagccaggcgtggtggcgggcacctgtagtcccagctacttgggaagctgaggcaggagaatggtgtgaacccgggaggcggagcttgcagtgagccgagataatgccactgcactctagcctgggcgacagggtgagactgtctcaaaaaaaaaaaaaaaagagtaaatatggcctgatgtgaaaaaaaattataaccaccagaatttcctaaaatgtattttattgatctatagtgttattgcacaacatccacaaatatctatgatgacaattgtttaaaattcaagttaaaatacaaaatttaaaaaagtttacctacttttacgttgttaatttatgactctttgggtttgaaatgagatttgatgtcattgtatttatagatattccttgacttcttgtgttatgtaccaataagcacattgttaagttgaaaacatcataaataaaaaatgtgtagctgggccaggagctatggctcatgcctataatcccaacactttgggatgccgaggcaggaggatcacttgagctcaagagttcaagaccagcctgggcgacaaagcaagacccccatctccacaaaaaattaaaaaattagccagttgtggtgctgcatgcctggggtcccagctacttgggaggctgaggcaggaggatcatttgaacccaggatgtcgaggctgaagtgagctatgacggtgtcactatgctccagtctgggtaacataatgagaccttatttttaaaagaacacacaatgagtagctgagtagggctgcggctcactgccactgccagtgtttgaagaacagttcccactgaatgcatctcaattttgcactgtaatcaagtagaaaaactgtaagtccaatcattgtaagtctgggaccatcttgtccatagtcttatgacagaatactgtttaaaagtgtagatctatccgaatgttgatgaatttattgtgaaatgcttccccttgtgttgcttctatgtgatctatgtgcagcagtggacattttttttttaagtgaaaaacaaatcatgcccctcccttcattctctcccccgtgatgtttcccttagagaacattcctcccttcccttcccagtccccacctcagagatggggcaactcctccctttttatcacacttcttccactctgaggctctaggcaatcagttctcggtcactcccacccatgtgaaggtttttttttttttttttttttttgagttggagtctcgctctgtcgcctaggctggagtgcagtggtgcaatctcggctcactgcaagctccgcctcccgggttcacgccattctcctgcctcagcctcccgagtagctaggactacaggcacctgccaccacgcctggctaatttttttgtatttttagtagagatggggtttcaccatgttagccaggatggtctcgatctcctgacctcgtgatccgcctgccttggcctcccaaagtgctgggattataggcgtgagccatcgcgcctggccccgtatgaaggtttttgatgatgcttgctagaatggacccagataattttcgtgtggacagaaggtagatttttagtagctcttgttagaggtcatgtaggagattgtctcagcttgagctgctattgcaaataccgatactgtagactgggtggcttgaaaacaccagaaatgcattcctcagagttgtggaggctggatgtccaagataggacaggtctgagatcagggtgccagcatgcttcagttctggtaggaatcctcttccaggctacagactgccaacttctcgtgtcttcgtgtggcagaaaaagggctaaaaagatctctgggattttttttttttttttttgagacagagtctcactctgttgcccaggctggagtgtagtggtgtgagtggcatgatcttggtatactgcagtctccacctcccgggttcaggcaattttcgtgtctcagcctcccgagtagctgggactataggcgtgtgtgaccatgcccgactaattttggtatttttagtagagactgggtttcaccatgtttgccaggctggtcttgaactcttggcctgaagtcatgtgtctgccttggcctcccaaagtgctggggttgcaggcacgagccaccgtgcccagcagggcctcttttgtaaaggcactaatcccattcgtgaggttctgccctcatgacctaattacctcctacaggtcccatgtctgagcaccatcacactggcatttaggatttcagcttatgaattttgggaggacacaaacattcagttcataacagcattgtgttgtcacccacttttttttttttggtaggaacagtgtgtcgaactctggtctcaagtgatcctgctgcgtcagcctcccaaagctttgggattacaggcacgcactgccaaggccagccacatccatattcttaatctccaccatggcctcatgagcctggtcccctgtcagtgggctagggcctcgacatgggtaatacgcatattagctgaggttcaggaacccaactgacttgtgtaagaatttccagctggccccgcagaacaagaggctaaagagtggggagcagtgctagtgttgccactgctacagctctcgggcagtattcactaccctcatcctgtatgtgtgcccaggtgctgggtgagcatttcactccacacgagaggcatcatgcattccttcattcgttcgttcatgccgttatactatagtgaacaataaactcttgaggaatgtcgggtttaggggagccagtcccctgttcagttgaaaatctgcctggctatgtataaattttgactcccccaaaacttaactactaatagcctgctgttgactcgaagccttactgatgatatcaacagtcaattaacacatactttgaattttatacgtattatgtactgtatgcatttttttttctttgagatggagtctcactttgtggccctggttggagtgcagtggcaccatctctgctcactgcaacctcccagatttaagtgattctcctgcctcagcctcccaagtagctgggattacaggcatgtgccaccaagcctggttaatttttgtatttttagtagagatggggtttcaccatgttggccaggctagtctcaaactcctgacctcaagtgatccacctgcttcggcctcccaaagtgctgggattacaggcgtgagccactgcacccttcctgtactgtattcttataataaagtaagctagagaaaagaaaacgttattaagataatcttaaggaagataaaatctatttactattcattaggtagaaacagatggattatcctacaggaggaggaggaagaggagggggttggttttacagtctcaggggcgaaagaggcataagaaaatctgcaaataagtggacccacgaagttcaaattcctgttgttcacagttagtggtacacaggagacactaggtaagctaaaggttgggctgggcatggtggctcacacctgtaatctcagcactgtgggaggtcaaggcgggaggatcgcttgaggccaggagtttgagaccagcctggccaacatggtgaaatgctgtctctactaaaaatacaaaaagtagctgggcattgtggcatgtgcctgtaatcccagctacttgggaggctgaggcacaagaatcacttgaacctggaaggcagaggttgcagtgagccaaaatagtgccacttcactccagcctgggtgacagagtgagactgtctcaaaaaaaaacaaacaaaccaaaaagattagctaaaggttgaactttcagtgatgaactaaacagaaacaatctcatagagattgtggacaggagaagaaacaagcacaggtgcagttaaaacccgtgataaatgccccggcagaaacaagtgttaggccaggcgtgatggctcatgtctgtaatcccaacactgtgggaggccaagacaggaggactgcttgaggccgggggtttcaagcctgcagtgagctatgattacaccactgctctcctgcctgggcggtagagaccctgcttaaggaaaaaaaaaagaaaggctgggcgccgtggctcacgcctgtaatcccagcactttgggaggccgaggtgggcggattacgaggtcaggagatcgagacgatcctggctaacacagtgaaaccccgtctctactaaaaatacaaaaaaaattagcagggcgcggtggcaggcgcctgtagtcccagctactcgggaggctgaagcaggagaatggcgtgaacttgggaggtggagcttgcagtgagctgagattgcgccactgcactccagcctcggcgacagagcaagactctgtctcaaaaaacgaacaaacaaaaaaacaaaacaaaacaaaacaaaaacctaaaccaaaaccaaaacgcagcatagtccatgagagaggaagagcagggcaggcctactcacctggggctgtcggggaggctgcccaggaagggactctgaagtgagcacctggaggaaggaggttagttctgagggactggaattcatcctggcattgggatcacgggcaaaggtcctgtggtgacaaggagactggtgcgagcctggcttagcaccatgtgagagcagaggggtggaaaggcactaggtaagcatgccttcggatgtgaaatgagggagacggggactgggggaccctgacatgagggaggaggaaaggagatgggaagaatgggtgaccagagggaccactagaccaccgagggtgagagcttgctaatatcagagccatgtgtaggagaatgaagtgcaatcttggatagacctccagtgcaggtggtccagccatcaatgaccataaccacatgcatgattgtaggtggaaccagaagaaccacccaggcaactcacagaactggggaactaatcaagtcttgttttaaatgactacattacgggtggtttgccacgtagcagtggatcgctgaaacagtttaaaatatctattcagccgggcgtgcggtgggtagctcacacctgtaatcccagcattttaggaagctgaggcaggaggatctctcgaacgcaggaatttgagaccagccttgagcaaaatggcaagaccctgtctccacaaaaagtaaaaaaaattagctgggtgtggtagcatgtgcttgtagtcccagctacttgggaggctgggacaggagaattgtttgagcccaggagttcggaggctgcagtgagctgtgactgcaccgctacactccagcctggacaacagagtgaaaccttgtctctaaaaaaaaaaaaaaaatctacaaaccaggcaggagcactgaatagctcctgtctcccctgagacccttgtagaccttgaggtctgttacagagctcaccaaccttctcttggtctagaattatctaaaaagagttgagtgcagccagaaaggactgaatacatggtgttcttcaatcccatcaaactgctgtgccctgcagatgatccctgagtccaggtgttggtgggttgaggacaaggctgagggaacagaggtgggaacagtggcccaggaccaggagaatgcagagttcagagtgcatgacctgcatctaactctagatgctccaggggtctgagaccatctccagcagggtctggaaggcccagtcattccccagcacgcacagtcaccactggatactatcttgctctgtgagtgatgcaaaggtcctgggtcagtgaagcctgtgaaacaaagttgggaccagagtgtctctacggttgagggctgggcttatttgctctctaagtataattgtaagagcaaatagaaacacctatcctctctgagcttaaaaggatcaaaaagctctgacagtgtcagtggtagggctagttcaggggctgcagtagtgctggtgcccacaggtggaaccttctcctgccctgattcccaaggactggtgctctcggaggggtctgggaggtatatttctctttcacaaatacgtgcacaacacatgaatgagctactggatgagggaataaatgaatgaatgagtgaaaaaagcttcctttctcctctccaggagttagcaatcactggttagttccccactgcccaccagcctgtgcagaggagggaggagcaacaggtcatagatgtggttgcagctgttactggacagagtggtcaagacatcctgtgtctgcagaggccctccccagccctcacctggacagtggagctgttggccagagaggcagtgggaagaagggtggggctcccagagtcgacccagcgggctgaaactggtgcagtctgcgcctcaccaggcagagaatggatgtggggcagcttgacaccgagcaggggctcatctgagcctcaggggtggttgctctatcaaagtgtttgcaagtaaacagtcccagtgcacacccagctgctcagtgccacctcgtgcacccagggccacttcagccttgatcacaggcctgcacaggttccaggggaggagacactccagctttttgagggagggtgagcatgtgggatcagagactttaagtccaaatttccccttaatttttttttaaatcttgcaggtagtatgcaaacatacatttaatgtattatttttattctcatttatttttttgaggcagggtctccctctgttggccaggctggagggcagtggcgagatcttggcttgctgcagcctcaactcaacctcccaagctcaagtgattttcccacctcagcctcccaagtagttgggactgcaggtgcctgtccgccatgaccagctaatttttaaattttttttgtagagatggggttttgccatgttgctcaggctagactcgaactcctgagctcaagtgatcctcccaccttggcctcccaaagtgctgggattataggtgtgagacactgcatccggctcccaaatttcccctttttataaggacaccagttgtactgaccggggccccacctctatgacctcatctaaccttcattaactccttaaaggccctatctccaaatacaggcacactgggggttagggcttcaacctatggatttgggggatgcaattcagtctatcacagtgccaagctgcacctgctcggtgagccagaacaggggtggggaaggcaccaggccctggtgcttctttcccatgcctgagtcactctacttggttctaggagggagaggagcatgggctgaaggcagtgctgcaacatggaaggggcagaacatcccaacccgctctgggcccccagtgtcttctgctgtacaaagcaggtgttttcaccccccgaggatgtgtcctcccttcctggctcaccaagcatttaaatgtagacagaaaatttatttatctggggtgcggtttcctcagggggaagttgaggtcacgacccctgaggtaccttaacccaaaggcctccagggcactggccccagagtctccagcaggtgcttcctccctgaatgcttccatatggcaagatcagagccacaaatgctgccccgacactgttccggtaaccgacgttgcagacccaagaaagtctgggatggtagtggccaggaacggggtgtgccacggccccacctctcagagcagggaggaggatgctgggccagcccttggggaccccaggcaccgtggccacaggagtcagagctctgcatgtctgcaccatgtcctgggctcctgtcctgctcatgctgtttgtctactgcacaggtgagggaacccccagatcccaaagactcctgccccttccttcatcctgccctgcccccacggcccacatgcatctgtgtcaccaggttgtggtcctcagccggtgctgcatcagccgccggccatgtcctcggcccttggaaccacaatccgcctcacctgcaccctgaggaacgaccatgacatcggtgtgtacagcgtctactggtaccagcagaggccgggccaccctcccaggttcctgctgagatatttctcacaatcagacaagagccagggcccccaggtcccccctcgcttctctggatccaaagatgtggccaggaacagggggtatttgagcatctctgagctgcagcctgaggacgaggctatgtattactgtgctatgggggcccgcagctcggagaaggaggagagggagagggagtgggaggaagaaatggaacccactgcagccaggacacgtgtcccttgaactgaagacagcagaggcacgcatccccttggagagactgtcatggaagagggtggagccgccgcccgaagcgccgaggaggctgagccactcagcatctcctggtcctgcagtgttgctgtaaatccccattggagactgcattagggaattaaagctgcttgtcactttttgctgagtttggtctgactgttgtgcgacttcgtagtaccagccttgggcaaaggcccggggccccgggagactggcagatcactgtggtgagcactcacctgagtccttacttttgtgggccatgggaggcaaggggttgaccgaagcaccctggaggggcatccatgcccaggacaggaccctctggtgtcatctgattctgcccagcggttacagggcaaacaagcttagaaagcacctggtctgggcctccagggagaacaggagccaggtaataggcctagagtgggttctccaccttggtcctatcgacgttttgggctggacagttcttggttgtggggctgtcctgcggattgttgaatggtgagtggttatctgtggcctctacccaccagatgccccttcccagttgtgacaaacaaaaatgtctccagacattgccaaatgtccccaggtggtaaactcacactgattgtgaaccactggtctagatgagcaagtaaatgcatttacttatttgtacaagagagtggcaggtgtcggcaaacatgttctttttttcctttttttagggataaagtcttgctctgtggtccaggctggagtgcagtggtgcaatcatagctcaccgcagcttcaaactcccaggctcaagtgattgtcctgtctcagcctcctgagcagctgagactacaggcgtgcatcaccatgcttggctatttatttagttttatttttggagagatgaatgtctcactatgttgctcaagctgatctcaaactcctgagctcgagtgatccccctgcttgggcctcctaaagtgctgggattagaggcgtgagccactgcacccagcccattttctataaagagccaggtggtaaatatttttggctttgtgggctatgcgatctctgtcacaactgttcaattctgtcctagtagcaagaaagcagccacagacaaacatgtcaacaaagaggcgtggctgtgttcttataaagctgtatttacagaaacagatggggctacactgggctgggtatggcgcccaggctgtagtttgctgagccctgctcgggagcactccagctcctgtctccaggttttaagcaagccatgcttggtgggataatcagagtcccccctcaacttatcttgcctgtgaccccaggcagaagcctctggacccatggagatacctagaggcatgaaggacgtggtctcactgagactgtgttggactgtctgggtgaagtagcaatggggagctccctgcagccccggcccacagcaaggccccctgagcccgtgggtggtgggtctgagtgtgccttgcagagagggactctctacactgggtgtccacacaacctgtagacatgcctcactcagagaggtgccgggcaaaccatctcccttgtaaccccaacttgcctgggaacgtgcattcaccccagctaaaaagatcctgaggcatctccccagagaggtggacacatgtcagtatcagcgttccatgtgtggtcatgagtccctctcttgttaaacagtggtctccagcactttgggaggccgaggcgggtggatcacctgaggtcaggagttagagaccagcctacccaacatggtgaaatctcatctctactaaaaatacaaaaattagctgggtgtgttggcacatgcccgtaatcccagctacttgggaggctgaggcaggagaattgcttgaacccaggaggcagaggttgcagtgagccgagatcatgccactgcactccagcctgggtgacagagcgagactccatctcacaaaaaaaaaaaaaaaaaaaaaagagacagtgatctcagcttatgccatactctatgcactgggttcttcctgcgtcaggcttttacccctgggccaggcccacattttaaaacattattatttacttgtttattattttattttagagataggatcttgctatgctgcccaggctggactgctgtggctattcacaggttcaattcatgatgctctacagccttgaactcctgggctccagcgatcctcctgtctcagcctgctgagtggctgaactacacgtgtgagtcactgcacctggccatggcccacagttttaaagaccagctagatggttccagaggaactctgtcttctgcttgtaacccgtccctctcttgcctccatccttcatgattctgggattccatgctatgagaagagatctagaaagccgggagctgagttggactcctgtatcatcctcatgcccccaccccaccagctcaatggaaaatgagacctggaactcaggcttgaggccagactgagtgtgagtcttagctctggaggagtcacttaaaatctaagccaacatttccaatgttgcatgtaaaggggataatcatagaactgattaacttatataaaaagtttttatctggccaggcgtggtggctcatgcctgtaatcccagcactttgggaggccgaggcgggcagatcacctaaggtcaggagtttgaggccatcctgggcaacatggtgaaaccccgtctctaccaaaaatacaaaaattagctgggcatggtggcgggtgcctctgatcccagctacttgggaggctaaggcagaagaattgcttgaacctgggaggcggaggttgtagtgaaccgaaatcgcaccacatcactccagcctgggtgacagagcaagactgtctctcaaaaacaaacaaacaaacaaacaaaaaggttttatccatcatgagtgctcaacaaaataatagtatcatgatttccccatcagtcacctgcctggccttccctgttgtcaaatcctttcctttagtctgagtcatttctcaccttgaccattatctggtctccttcccatccatcctcctgctgcatgcagtctatacccaccactcctcatctttgttgctcctagatccagccttgcatgcattcctcctctctaaccctttattgtctcccacactctaaagaacatatgcaagccacatctgtaatttccaattttctagtggctacattatttttaaacagtaaaaacaaatagatgaaatgattttttaatgatatattctatttaacataataaatccccaatattaccaattcaacctataatcaatataaaaattagttactagatagtttaaacttgtttttcttttgtattcacacttcaaaatctggtatgtattttatattcatgtcttggataatttgctcaagtggataatctggtcagccaagtggtcaagagctacatatgccttgtgaagagaccactttggttgaggggatgcaattcagcctccttcccatgacacagcctttgaaggctggctcaggcttggtcccaagtcccatttcttgtgcaccctctctccctgtttctgccatgttaagccaactgcaactgatcaaacacccgagtctcttggttgcttctaaacctttgcccaagctgtttactgccaggacttcctgtccctttgttgtggcctccatctggctgcactgactcggggctccacaactgtctcaaatctcactccttgggcaagacttccccgagctcttcatgcagttattaacttcctccactgtgcaaacagcatgttttcctaactatatttagcttctactgcacagttataaatttatttagcaaagctccctcccctactaatctgcagattctcagtgggcaggatctactcaacccattgatgtgcctgataaacacttggcaattagacagttgaatgaacaaatgaatgaatgtgtaactgaatgaattttcgggttccaaggaccctgacattctgggatcccattaggtggctggggtcaccaccttagagaattgtgattccctaagaagggagaaccagcccagaccttctcgatcatattagtgactggccacatttcctctcctttctgattctctctctcccccacacccttactgcatgacagtgatgagaaaatccacttgatcaaccaaactacaactttcggcctcatccctatccctcccttgccttctgaccagggccacagtcaccctgtgggttcttccttttgagtgtctctcactcccttcctcctccatatctctgagaccagcctccagccctgctggcctgctctgctgccttctggctctttgttgaacccaagaccagggtttatatatgttaaatataaatatatttttccatatgaaatgtaaacatattttaaacattaaatataaatatacatcttagatatggcctgtgttggaatgtgtaatagattgagtatataatgtctattcaatataaaatttatatttatatatgcagtaatgattcaggttgattgtagttaagaaaaacaagctccaaattcgagagaaatatgtaagaagagagacaggaagaaaaaataatgaggcaggtaaatgcaacagacaattcgagacccacaagtgcagagcaggcttcccagacccggataatgtctcctgggctgataggaagccctcaaccccccaagtccttctcagccataaaccgcctgagcacagagccacagggaccgtgttggggctgggcctctcgactttagttcctctcattctgtgcaaaaggaaaaacaattcagaatctacagaggtttagatgtgtgtagatgtggacagagaagtcctggcacggtggttcactgcccaagaagacagtgagtccctggagggatagaagaatatacatcatgctaatatatgtcatcccagtactttgggaggccgaggcgggtggatcacttgaggtcaagagttcgagaccagcctggccaacatggtgaatccccgtctctactaaaaatacagaaattagttggctgtgggggtcgatgcctgtgatcccagatactcgggagacagaggcaggacgaactgcttgaacctgggaggaggaggttgcagtgagctgagatcatgccattgtactccagcctgggggacagagcaagatcccatctcaaagaaaaaagaaaaagaagttgtgagtgctaagttctctctggattttcaggaggccagttctccagtccacagtggcctgggaggacaggggttcctgagggtgaacagagcctgtgcccggtcaggtaggatcgcatgtccctgaggttcagaacccaggagcatggggagggtccagggggttcctgctgcatggagggaagaccctctttccacaggggccccggagagcgagaggaaggaggagggcaggtcagtgagtgtgacggggtcacagtggagagggaagcagaaagaagtgtccccacaacaagacacacacagtgtctacgctgaagctacagagagggcctctccacctgtgtctgccgcaaagcagtggggcgtcttctggcagcccagagtcacctccagatcccacctgcaccatgcttcctgcagggactgcctgtcttcctaatacactgtcttctgaccagagtcttccagacaaatcactggttgctatatatatatatatatatatttttaatagctaatatcttacactgatatatttatattatatataaatatttttgtactttatgtttaggctatattacagatgtagttagttagctatttatgttatatataatataaacatgatgtagattcttatatttctctggggactcactgtcttcttaatacactgtcttctgaccaaattcttccagacaaatcagctgttgctatatatatatatatatgtgctatatatatatgtgctatatatatatgtgctatatattttattgcatagaatatattatatattaattatataatatacattatacattacatattatatataatatattatattattatgctatatcttatatattatatatgttatatatgtatatatattatatatacacatacatacactcatgtatattttaatagctaatatcttacactggtatatttatattacatatgtttatatacaaatatttttgtactttatgtttatgctatatatacagatgtaattagttgtttatgttatatgtaatataaacatgatgtatattcttattttcctgtgaggacccactgtcttcttaatacactgtcttctgaccaatgtcttccacacaaatcagctgttactatatatatatataatatttatatacacatatacacatacatacacacatatgtatattttaatagctaatatcttacactgatatatttatattacatatagttatatactaatatttttgtactttatgtttatactatatatacagatgtcgttaggtatttatgttatatataatatattaacatgatgtatattcttatattcttctggggactcactgtcttcttaatacactgtcttctgaccagaatattccagacaaatcactggttgctatatatatatttttaatagctaatatcttacactgatgtatttatattacatatagttatatacaaatatttttgtacttttgtttatactatatatacagatgtagttagctatttatgttatatataatatatcaacatgatgtatattcttatattcctctggggactcacagtcttcttaatacactgtcttctgaccaaactcttccagacaaatcagctgttgcaatatatatatatatatatatatttattttttaatagctagtatcttacactgtggctcatgcctgtaatcccagcactttgggagaccaaggcaggtggatcacctgaggtcaggagtttgagaccatcctggctaacacagtgaaactgcatctctactaaaaatacaaaaattgattgggtgtggtggtgcatgcctgtaatcccagctactcgggaggctgaggcaggagaatcgcttgaacccaggaggcagacgttgcagtgagccaagatcgtgtcgctgcactccagcctgggcaacagagtgagactccatctcacacacacaaaacatcttacactgatgtatttacattacgtgtagctgtatataaatatttttgtacttacattctgtgtacttatattctatatattataaaacattatataaaattatacatgtataataaaatgttacataaaaattttaatataataccattttactacatatatttctaaatttaatataatgaaattttatatataataatgtataacatttctaaacttattataatacaatgatatataattattttctcatattataattatacataaggtaatttattgtaaataaaattttatataatctacgtttattataataaaattttattacatataacacatttctaaatttaatacaataaaatactatgtataataatttataacatttcaaaatttattatataattttattatacaattattttatacataattatatatagtatataattgtatttatagaaatataattatgcatatacaatatgtaattttatttttacatagtatatatacataattatgtattaacaaatataataatatcaatttatatacttatttacattaagttatatattatataaatgatgttatatgttatatgttacatatatttttgcttaatatattaaatttaatctataaaattatgtattacaaataaaagtgtattttacatatacactacatataactttatttatataaaaatataaaagtcatatggttaagttaataaaatatatttatatcaatctattcatataaaatatacacaatgcatatttatataaatacaaagtatataaaacttttaccagtaggatgcaaagagttgctgaccgtctgcagaaatcctgaacctctggaagcagaataaaatcttacctcccagtctgctttgaaaggaacagtaaagcagtcccgaaccccaaacccatcctaaggggagatgggggagttgggatggacgcgttgaccagtgaggactttcctttgctggttttgaggtgtcttagcccagaagctaagacgggaagtgattctggagcaggtgagctgatcacaagcctgagccaagaatccatggagctcataaatagcagaagccgggaccctgtgcaaatccttctgaaatatcccccgtttactgggctcctaggggtggggaagaaaaattccctgacatttcggcctcagggaaagagagagagaccccactggccggaagcctctgctatttttcagaagacagctggggcatcactctttcccaaatgacggtgattttcagagtggttcactttttggagagacatttctgccctggagatccatacatattgaacccaaacgaatattttttaattaaaaaaaattaaacattagaaagttcaatattgaggcagctacgagtttgaattcctcatttttcctagatgcatgttgtcaaaatctgtattgcatttagtaactacttatgtgtctaatgtatataaggttacacaatgtttttttctgctcctcagggtcagaatttgaaataaaagttttggaaagaaaaaacactcttgtctgtttgtgcaaaaataaaagaacccatattttaagaatattttaaaataaatacaaattttgtgtgggagggttgcttataagaattcttcatatcctaaatcaaagacagatcttgttattaaccagaaaacaaaatgtgtgtgtataaatgtacaacactcttacactcacacaaacacaggcacacacacacattcacgcactcactgatgtactcacacaaacacaggcattcatgtataaatacacacataagcgtgtatttatagaaatataattacacacatacaatatataattttatttttacatagtatatacacatcattatgtattaacaaatataataagatcaattttattatatacttatttacataaagttatatattatataaatgatgttatatggcatgtatatatcacatataactttgcttagtatataaaatttaatctataaaattatgtattacaaataaaagtatattttacatataaactatatataactttatttatatgaactataaaaatcatatgtttataataaaatatatttatttatatcaatatattaatataaagtatacacaatgtatatttatacaaaaatttttaattaaaaaatattcatttgggttcaatatgtatggatcgccagggcagaaacgtctcttcaaaaggtgagccgttctcaaaatcaccgtcacttgggaaagagtgatgccccacctgttttctgagaaacagcagaggccagtggggtgtctctctctttctctgaggccgaaatgtcagggaatttttcttccccaccactaggagctctgtaaaccggggatatttcagaaggatttgcacagggtcccggcttctgttgtaaatgagctccatggattctcggctcaggcttgtgatcagctcacctgctccagaatcactgacacaaatgcaaccacacacttacacaaacacacatcaacaccaagacagacagaagcacaaaacacactcatagaaacacatggacacacaaagacatgcacactcacacaaacgcagggacacacacacaaacacaattacaaaaatgtggggtttttttgcacacgtgggtgcacatgcacattgacatgctcacaaagcacacaaacacgtatacatacaaagacactcataaacagaatcatgaaaacactctcatataaacacgtggatggctactcacccacatagacactcacatatgtcacacgcactcatacacacactcagaatcacacaagcacacacaaacacacaaatacagtcacacactcatgcaaacacagtcacaaaaagactcacataatcatgtggacacacaaacataaaaattcacacactggggccgggcaaggtggctcacgcctgtactcccagaactttgggaggccgaggcgggcagataacttgaggtcgggagttccagaccagcctggccaacatggtgaaaccccgtctctactcaaaaatacaaaaattagccagatgtggtggcgtatacctgtaatcccagctactcaggaggctgaggcaggagaatcatttgaacccgggaggcagaggttgcagtgagccaagatcacgccactgcactccagcctgggcgacagagcgagactccgtatcaaaaaagaaaaattagccagatgtggtggtgggtgcctgtaatcccagttactcaggaggctgaggcagaagaatcttttgaacctgggaggcggaggttgctttgagctgagattgtgcctttgcactccagtatgggtgacagagcgagactccatctcaaaaaaacaaaaaaaaagaatttatacattgccatacagattcacagacatacactcatattcacaaacacacaaatacgataaacgcaggggcacacacaaacaccatcacaaaaacacacttccataaaacacaggaatgcacgctcacacagaaacacgcatggaaacacacgttatcttacagattcacagacacactcatcatcacataaacaggcacacacacacagccacacaagcacacacccacacccacatcaacacacacactcccacacggcacccacgcgctcacgcacataggtagaacaggcctgcattacctgataacgcagttagatcagacgtgatgctgcctgccgaggagacctggaggcttcccatgaatgggctttcggatgagaggtctctgggtgcatttggtgacaccccaggcagtgggggagacgtccaggctggaaggccagccacagccagctctgcccaaggatgccacgtccatttgcttcagtaggatatgcaccctggaaacccaggttcctgcctctccaggaaaccccactgaggtcagcacatcccccaaggtttagaaggggtctctgggtgcatttggtgacaccccaggcagtgggggggacatccagcctggaaggccagccacagccagctctgcccatggatgccacgtccagttgcttcagtaggatctgcatcctgtaaaccctggttcctgcctctccaggacacgccattaaggtaagcacactccccaggtttagaaggggtctctcggtgaaatgtggtgacaccccaggcagaaggggggacgccacagccagttctgcccacggatgtcacgtccatttgcttcagtaggatctgcaccttggaaacccaggttcctgcctctccaggacaccccactgacgttaacacaccctccaggtttacaagcggtctctgggtacatttggtgacaccgcaggcagaggggggacgccacagccagctctgcccgcggatgccgcgtccatttgcttcagtaggatctgcaccctgtaaaccctggttcctccctctctaggacaccccactgaggtcagcagcccccaccccccacccccaggtttgtccagcttcgctgtctggggagagacacagaaagaccacattcggtggaattctggctataaccttttgtagccggcaagaaggatcaccaagctgtcccgttaccttgctggagcgatcactggtttcacgcttggcccccgtgcagttagtgcctgggccaggctcgattcctggagctcaggtgaaatttgggcttggagctcacgcctgcaccatccagaaagcagaaggcagccggcccgggctgtacggttcgtagaatcagagagaacactgcttgccttcatgtctgtaccacaataaatctgccaactgcggtcaaagtctctggattcctgccccctcattttattttgtctattacggagtggaaggagtgagaaagattttgcttcctattttgttttgcaaagcgcttctaagaaaaacaacccgtgttctgaaaacgagattctgagtgtcccctgggcgcgatgaaaacaaactttgggaatccaagggcctgagaggcagagtgaatgtcatttgcatttccctgcgaatgacaaagtcactttttatttattattattattatagattcaggggatccacgggcagctttgtgacctggggatattgtatgatgctgaggtttggggtatgaatcatcccgtcacccaggcactgagcattgtacattcctgaggtatataatgtgtactaaaaataaaatgtatatttatatatgcactaatgattcaacttgattcctcgtaattaagaaaaacaaaccccaaattctagaggagttctagaaatatataagaagagggccaggcgcagtggctcatgcctgtaatcctagcactttgggaggccgaggcagacagatcacctgaggtcaggagttcgagaccagcctggccaacatggtgaaaccccgtctctgctaaaaatacaaaaattagccaggcgtggtggcaagtgcctgtagtcccagctacttgggaggctgaggtagaagaattgcttgaatccaggaggcagaagttgcagggagccgagactgcaccactgcactccagcctgggtcacagagcgagactccatctcaaaaaaaaaaaaaaaaaaaaaaaaaaaaaaaaaaaaagagagagagagaaaacaaacaagcaagaaaatgcaacagaaaaatccgtgacccaaagctctctccagttgctgctttctgccggaaattcaaagaacctcagggtagtttttcaacccttgtacccccgcccctgcttcctgctctattagtcctgagggtctgtggtgccgctccatcatgtccaggtgcaggcaatgtttagctcccacctataagcgagaacatgtggtatttgattttctgttcctggcattaattcactaagcatagtgccctttggcttcatccatgttgatgcaaagggcatgattttattcttgttcatggctctgtagtattccatgatgcggaaggaccacatttgttttatctaattgagaacatgtggtatttgattttctgtttctggcattaattctctaaacataatgcccttcggcttcatccatgttgatgcaaagggcgtgattttattcttgttcatggctgtgtagtattccatgatgtggaaggaccacattttctttatctagtggagaacatgcggtatttgattttctgttcctcgtattgattcactaagcataatgccctctggctgcatccatgtggctgcaaagacatgattttatttttttcatcactgtgtagtattccgtggtgtaggagggccacatttgctttatccagttgagaacatgtagtatttcattttctgttcctggcattaattcactacgcataatgtccttcagctgcatccatgtggctgcaaaggacatgatattattctttttcatggctgtgtagtattccatgatgcagaaagaccacatttgctttatctagtggagaacatgtggtattcgattttcttttcctggcgttaattcactaagcataattcccttcagctgtgtccatgtggctgcaaagatgtgattttattctttttcatggctgtgcagtattccatggcatagaagggccacaattgctttatccagtcaagaacatgtggtatttgattttctgttcttgtgttaattcattaagcataatgccctccagctacatccatgtggctgcaaaggacatgattttattctttttcatggctgtgtagtattcgatgctgtagaagaaccacttttgctttatccggtaccccactgatgggcaactaggttgattccatgactttcctattgtaagtcgtgctgtgatgaaccttacagggctgggcactgtaatcccagcactctggagggccgaggtgggcagatcacctgaggtcaggagttcgagaccagcctggtcaacatggtgaaaccccatctctactaaaaatacaaaaattagccaggcatggtggcgcatgcctgtaatcccagctgctcaggaggctgaggcaggagaatcacttgaaccaggaggcggaggttgcagtgagccgagattgcgactgcactccagcatgggcaatagagcgagactccgtctcaaaaaacaaaaacaaacaaacaaaaaaaaaaaggaagtttaccatgcatgtgtctttttggtagaatgacttcttttcctttgggtagatgcccagtcttggaattgctggcgcaaatggtggagcagtttagattcaggaggtacatgtacaggtttcttacatgggtacgatgtgtgatgctgaggtctggggtatgagtgatcccatcacccaagtagtgagcataataccccacagttggttttttcaactcttgtccttctaccttcctctctccccctaactagaccccagtatctcttcccttctctgtgtctacgtatacacaacatttagctcccacttataagtgagaacacgcagcattctgttaatttacttaagataatggcctccacactgttcacaatagcaaagatgtggaaccaacccaaatgctcatcagtgatagattggataaagaaaatgtagcacatagacactgtggaatactatgcagccatgaaaaaggatgagttcatgtcctttgcagggacatggatgaagctggaaaccctcatgttcagcaaagtgacacaggaacagaaaaccaaacactgcatgttctcactcataagtgggaagtgaacaatgagaacacatcgacccagagaggggaacatcacacactggggcctgttgcaggagggggggactggaggagggacagcattatgagaaatatctaatgtagatgatgggttgataggtgcagcaaaccgctatggcacatgtatatctatgtaacaaccctgcatgttctgcacatataccccagaacttaaagtagaatagaaaaaataaaaaataataaaaataattaaaaaagataatggcctccagctacatccgtgttgctgaaaaaaaaaaacaccaaaaacatgattttgttccttttcagggttgtgtagtattccatggtgtagatgtacggcattttctcgagggtggagggtgggaggagggagaagatcagcaaaaacaacctgtggctgggtgtggcagctcacacctgtattctcagcactttgggaggctgaggtgggtggatcacctgaggtcaggagtttgagatcagcctggccaacatggcaaaactctatctctactaaaagtacaaaaattagacaggcacggtggtgcacgcctgtaatcctggctcctctgtaggttgaggcaggaaaatctcttgaacccaagaggcggacattgcagtgagccgagatcatgccactgccctccagcctgggccacagagtgggactccatctcaaaaaataatcataaaaataataataataacctgctaggcttaggacctaggttgattccattacaaaaaaaaaagaaaaaagaaaaaactaactttttaaaagaaggatctccctgttcaaaaacaaaaccaatgccctgtcaggaaagatgttctgtgtttctggtaaagctggaaggaacctacaggaaggagtcaccccataaaactagtggagcagcattgccttttggggtgagggctgcttctgttaggccaccaggatgagtaccttcctggggagtgtggttcatcctataccatccaggaagcaattcctgcccccaaatcacccgccagcttctgccctgtaagtaaaatccccagcaagcgggcagcaaggagctacttgccttggaaggcagccgaagtctctgtccaccacccagactgtgtcctctgggcaaggccagggcttccaattggatggttttcacattagcggctgctgtttagaatcatcaacattggccaggcgcggtggctcacgcctgtcatctcagcactttgggaagctgaggcgggcggatcacaaggtcagggaccagcctggccaacatggtgaaaccctgtctcaactaaaaaaaaaatacaaaaattagcttggtgtggctgggcatggtggctcatccctgtaatcccagcactttgggaggccgaggcgggcggatcatgaggtcaggagatcaacaccatcctggctaacacggtgaaaccccgtctctactaaaaatacaaaaaattagccaggcacggtggcaggcacctgcagtcccagctactcgtgaggctgaggcaggagaatggcgtgaacctgagaggcagggtttgcagtgagcccagattgcaccactgcactccagcctgggtgatatagagtgagactctgtctcaaaaaaaataaaaaaataaaaaattagcctggtgtggtggtcggcacctgtaatcccagctactcaggaggctgaggcaggagaattgcttggaccccggaggcagaggttgcagtgagccgagatcgcgccattgcactccagcctagacaacagagcaagactctgttgcaaaaaaaaaaaaaaaaaaaaagaatcatcaacattgccttggcccaatctcttgtcaaatatttaccactggacctccatgttctagtttcaaagctctgctggccacagtggctcatgtctgtaatcccagcactttgggaggctgaggtaggaggactgcttgaacccaggagcatgaatccatcctaggcaacatagtgataatagtgtcaaatcagagccagtgtctggtaattccccaaatatctgagaattttcttttctttaagtcatagtcatcctggcagaaggctgtaggtccctttggggaagactgggaaaaagataaacaatgtaaatttttggcaatgtagcagcgtacttccccaagatcacccagcctccccttcacttaaggggttgtgggcctgtgaactggctcaagtctgggaattgattgagggttttagatctgtgtttcattaatttgagttagtcttttattcagttgacctagaattcttcattttttaaagaacaactaagactttggtacagcccattagctctccctgtggataccatggattacacaatgccgtgggtgtctgtgagtcaaaccattctgactgctgctttgacactgctttccactgtggtgaccacacccaccttatcttcggtgattaaggacagcccatgttccctgccaccctaggattcaattatcctcattttacttaaagatcccagtccagtggctgcagttcctgctgtaacattttgcctactgagagcacaagctcaaagctcttccaggatactgggctcctctcacaatattctttctcatgatcgtcgtgaggagtatgttctgtagaccctccagtgtgagtgagcaggtctgacataataaatccagtctccgtgagtttttgcatacctttctgtacacataaaccaaggaagttgtggcatctcaactttatgtaccttaggtaaactctgattctgtttcagccaaccaaccaagtcaccaaacaaataagcaaacagccaaccaatcaaccaacaagcaagcaacaaaccaaccaaacaaccaagcaaggaagcaagcaccaagcaagcaagcaaccaaccaaccaagtaaccgatcaaaccaacccttggagccctttctaaagctttgacttacaaccctgagtccagaatctctgtttagtgggccaacattaataaatgtagccgaatccaactttatgttacttccaccatggtgccactcacttaatatccattcccacgtatattctccagatttccttctgtataaattgcgtgtgtgtgtgtgcgggtgtatgtgtgtagaaagagagcatcaactgaaaaatcacaaaattttataaatttagaaaagagagctttatttcttataaaggtttgcagtccgcaaggtggccattatgacaggctgggaagtgtggcctacagccaaggccagaggcaggcatttccagggagggaaggagaggacaggaatttgagccaaatgagttggctacatatacatactcaataggatatcagaggagctacatcattttatgagaatactcataaaagaggtcctaacgcatgcatattcaataaacatgcatgttcattctggggtggagacttgacatttaaatgtattataattaggccctacacatcaaaaagtgaagcagggacataaaggtactcagcctctgtaaaggctcagcctctgtaaaggcacagcctctaaaactggccagaaccagtccatggaggatggtctcttatcaggagaaagttactgaaatcagtcccttgtccagagaaagctgtcgttaaggttagtggggcaggagatcagttactcagcgtctgtgaactgggtgagttgtaattgttttaatcttgcttctctcacagccagtgcttgcttggctgctagagaaaaataaaacccatgtggtagttagaatctagttaattctttaagagtagggtacaagacttaaccctcgcctggcatggccctaggccctgtttataatttgaggtcttattgccacaaagagtctgttctgtcagtctcatgatctctattttaacattaatgctgctcagttgttgggtctaaaccataagagggagggaggtacagggaggtatgtctgacctcctgtcctgtcatggccgagaactgaattttaagatttatttgaggttccgttggccaacagggggtctgttaagtcgggtggggggcttaggattttattttttgttctcaagggagataaaataatttaatccattggcctctgtgactgtgggactaacatggctatgatctgtcggacagacttcaggctggcacccaggcaaaattctatgctgtagtaaatgcatcatgcacatttgtaacaacacgtacataacaatgtcacaaaatactttcacggtgacaactagattagtgttttattgaatagctgatgacataaactgtctcatttggtgccaagactgaccatcaccagcataccaaggtcatcactgatcagaggtctaacccaaggagggggtcatgtgcaggcccagcggtggggaggaaagatgctgcagaggagatggatgcccacagaggcccctgagcggataccatgctcactaagtggtaagtatagactcaacgtaggctgtaagctctccccctgtgtaaatgggaccccgtacacttgagagtcaagggtctgtttgggtggcagggatagccacttctgaaggtagaaaggaaaataagccaccaaattggtacctttctgtgaaatggacatcgtgctcagaatctccattttccccacaacctggaggagtaagtactgtcatctgcattttgtagctgaggaatctgactcaacaaaattaaattactcgcctaagcaattagcaatcaaccaagtctttctgactcagaaacccagctattgcctgttcatatccagcccctgtattggggtcaagatctggcctgttctcaatgcagcaagatccaggcagatcacactggactcccagcactgaatctggctcgaggggacatcaaatttgactgggtcatggggctcaggagcatcactctcaaaaatagcagtacaggaagaggcaatggccctaaacagcatttgcaggcagatcccatgttaatcgtaagggtcaggactctctcacttttctgtctctctctctgtctctcctctagggctgaccccacatcggacaccactgcatccatgtccatcacaacacagctgccttttcttctgcctgcttatgggaaagtcccctcctctcctccgtttccttctcttcctgccctatcacactgtgcacttctccctttccttaaagaaccaccatcaactttaggaggagggaaaggggtggctctgggaggaaaagccagaatcccctctagccagcagagagagaggaatggctgcatgttttctcccccaatccaaggcactaggttttggctaggttgcaggttccaagctgctctcctgctgtgtcggtgagttctggttaacctgcaacctcctgatgtggccactgcagttcatcgagtcttcagggactccccatggcctggagtactttgccttgcttacatgggagaggagaatggatttatagagaacatcatctaaatccaacttgaccattgtgtggccacacttgctagattgctatagtctaaatctagcattgtagaaagacgggggagcttggagctgcacaaacccaggtctggaacgggctccttaccttggaaggtgaatgatcctggtaggactcttagcctccctgggcctcagtttctttatctgtttcatgggaatgaggatctcggctggttggttgggtgatgcgggggctgtgtgaaaacagcttgtcaatacaagctgaaatagaaatatttctccacagagtatgaagatcaaatgagagaatacatttaaattaaatggaaaattaaaatggcaaaaaaggcaaagctgtattgaaagttccgagcttctctataaggagctttttgactatgtaagaatcctgtactcgttccccctaaatataaaaaaaaaatgttgaaggaggcagaagggagagtgatgcacgatgggcgaggacttcacctgctgttgctggctttgaggatggaggaaggaggccacaaacctagaagctggagcccctagaagctagaaaaggcagggacccgattcatcccttgagcctccagaagggacatagccctgccagcaccttgactttagcccagtgagatcctcttaggacttttggcaaccagaactataagacagaaatggaagccactgagtctgtagctgtttgttgcagcagcaatagaaaactaatgcagagcccaagaaatcactggtgatgagatggggaagtgggctcaggaggtctggatctgtgatgagatggggaaagtgggctcaggaggtctggatctgtgatgagatgggggaagtgggctcaggaggtctggatctgagttggggatctggagtggaaggggaattcatttgttcattgtctatccttttgcattaattgaatttttttctatacatacatgtgaattttcacaataaaagttttttccaaaataaaataaaagaaacaaaaggggctttttgcaacccaattcctatctatgtctgagtccacttgtattgaatgagtctttctgctaacgtccttatatttgggtgactatctgaatgtcagtgaccaatcagagcagaggcagaccttggagtgggcagggcatcctgagggccctgattcctgccataaggcataaccctttaggtgccagaccatggggaggtccaggggttgcaggggagggctgtgcatctgcaatggctctcagggggctcccggtggtggcaattggtgaatctgcatggtggtgtttcagtattgtcacaaccctgctgtctctcatgctctcaaaaagcatttctcttacctgtgacagacttcctatacctaacagcttgcaaaaatgttccagattaatgagaataatctctcggagccatacctccctgcttggggtctcagtttccccaaatgtctccagacaagttaggctagaaggcccctgagtctcagcccctctatagccctcctgtcacccagacctgatctgggtcttgcaccctgggtgcagcatgacaggggtgggcaggggctggctctgggccagaggaccctttctgatggacttcagctgttggccttccaggggagactgatcaacctcacaagagtcatatggtgagtagcggtgggcaaatccatccccctcatcttagatttatggggagacagagacaaagaggagacactccaggaagacctgcaggtgggagtaccaggttgaaaccaaggacaccttcctggaggagctgccgtttgagccagctctgagaacaggtggagacaggactggagaggaggaggttgtgccctatgagcaaagactggccaccaccccatctaacacccccacagggcccctgtggcatccctgtccagtccctgtcaccacccagtttttccctctggacccaggaattcaaagtaagcaaggaggtccgctgctccagttggctgcaaataattacaaccttgagcccaagcagcactttgggtcctggtttgggaccatgaagcggctcggtgagactgagaggtaaggccagggcaggaattgggatagtaggattgaactctccctgggggccagcctcagaaagcctgtggccatggcctcttggccaacatcagatcctgtggtctggcaatgcctggggtacccagacctcactctggacaggccctgggagggggccctggtgagattcctggcagcctcacagccactcttctgtccatagctacaacctgtcatgccagctggaggctccatcccagttggctgggagcataaagtccaggaagatagacatcacccaccacaggggccagtcagggcctgaaccagggcgggcagaggttggctgccttgggatatgggtgggctcagggagtcagacagcaagggactagcctcccatcctactgctgagcagccctgtgactggggagagtcaccttacttctctgggcctcagtttccccctctgtggagtgacactaaatgatctctctggagacggggatcaatagggtactggtgattgaccaggcactcagcacatgcctggagcacacagtgcagggctgtggtggggaggtgggctgagttcctagggagtcacccatgtgtgcctgccgttctgaccagccaccaggccctcagggcagagcccactaccagcagcagctcacaccccaagaccagctcagaggcggcccctacctcagcagcagggacatcacagacactttgagctggcactagggtggcttctccagctcccacggggagaggggtcccagctgagtcccactcacgtggagtctcatgcccatgaaagtgccattcaccactggccaggctcatgaggccgcatgagaggggggtcactggggaggagatatcgggggaacagagagggtggttgaatttttgtataataggcagtgcaagtgtttaccgtttggcaggggaaaggtttgttattattagcaatgctacacttcaatattacactaaaatccagtttctctataacctgggagttgctcttttgttctttcttttcccatcttaattaaaatgagatgcagactctcacggtccacagtcgattaagaaatcttgcacggccatcaggttatgtcttggagagcagagtttcagtaccatcagcctggcaaggagctgggcctgctcctcagagctcccgggactgcgagaattggcatgttcacaaggcaccgtcacagcctctgaaacacgctgtctttaaagatgtttgcaggctggacgcggtggctcactcctgtaatcccagcactttgggaggcagaagcgggtggctcacttgaggtcaggagttcgagaccaacatggcaaaaccccatctctactaaaaatacaaaaaattagccaggtgtggtggcaggtgcctgtaattccagctactcaggaggctgaggtaggagaactgcttgaacccaggaggtggaggttgcaatgagcagagatcacaccactgcactccagtctgggcaacaagagcaaaacttcatctcaaaaaaaaaaaaaaaaaaaaaaaacacaaaacacaaagacatttgcaaggaccatgtcctcacccagaatggtgcctgcctttctacagtttttcaggaaaaggaaacattttctgcttctctcgctgaggttttttttaaccacccattaggaacctatagatttcaggatcgaacactgggattccctcagcactaaaggaggacaattgcaaacagagctgaaagtgcaatgtggaaaggtcaggctgaggaaggttcttagccagtagaccaagggcaggaaggacactgcctcctcagtctcccactagggaacttgtgattcttgtcccctgacctcagaattccttgtcatgtttgttttgtctccaagggaagggtttgaattacagaatttaaggctagagtgggcctcgtgcagttaacattaaccctctctctccttcgctggccaaggtgaagtccggaaacatgtagttctgacgtccactctctcgggggatcaccagttcacccatctcacccggcaagctgggacctagtttggcgacaggcatcttccacccacctgggaggcagggttcaacactctgcctctgaccttgtttccttcttctgccacctgcttaggcagccagaaggggttgtccagccagcacctgggctttggcgctcctcaagcaggtggaggaagtttcaggcacctggctcctcaggtgtctgccatccaggtgctcttcaggcctgcccagcagagctctcttgatccagctagaactggccagaactgactcactcaggaatgtgtagactttggcatcaggggctgctttaatttgcacaatttccaaatacctcttttttcttctttttctgatgagtcatcttcctagactttcattttaaagagatagatagttatcaggttccagagaagacatggtagaacatttatatctcaaagacacagagctgagacttcagttttagatactataatttgcctaaaccaaaaaggaaggtgtaggtaaagttctagtcaagacaggatggccaggaaaaacaccttaaaccaagggatggcttgctttgctgatttaagccaatggcttctttatcataagacttcccagtgatttagtcctccctctcttccagtgcacagagacatacccctccttacaaataaaaatgttctttatagatgtaaatttattttacaaaaatgtttcaaaataaccagatgaaaatcatccttatgccagaaagacttgttttttttttcattactagaaatgaaacagtaagtatttgttgtattgacatacttaggcttagacctgtgtttaacaagaaagcctaataatagcactgtggttagactgtagcctatttttccaaaccatcattttattattaaggaaacgaaggaccaaatacctttcattcatctgatatgatcctttaaaacacattccactaacaagtcccatttggaacagctgaaaatcttttaataaaactttttaaagatgagctcatggcttagtgtaaatttcacaagcttaattaggtcaaatggaaggaactcagatgagtagttgcccaatcagagcccattatttgtaagtcatcagacccctccatgaccttaaaactccactctgacctgattattgcaaacctatatacaaaaaagtgaaaggattaattttcattcatcaacctctcaatcccagattttcaaagaaaaaacctatgtaaggaatacttaccaaaaccagacaggaaaattagagcctgcatactttagagtcaaatttgttccactacagccaggtcgcatacaattacatcatttggttcttcatacactctagaactgactaggacagagtttagcatagaagaactgtaagaaataggttctgaaacatagaaattgcaaagttcaaaaggctatgaaaaaaactaatgtaaatgagagactcccctcactttgttttaaagaaatagacccatcagagaaatgcaaatcaaaaccacaatgagataccatctcacaccagttagaatggtgatcattaaaaagtcaggaaacaacaggtgctagagaggatgtggagaaataggaacacttttacactgttggtgggactgtaaactagttcaaccattgtggaagacagtgtggccattcctcagggatctagaactagaaataccatttgacccagccatcccactactgggtatatacccaaaggattataaatcgtgctgctataaagacacatgcacacgtatgtttattgcggcactattcacaatagcaaagacttggaaccaacccaaatgtccaacaatgatagactggatgaagaaaatgtggcacatatacaccatagaatactatgcatccataaaaaatgatgagttcatgtcctttgtagggacacggatgaagttggaaaccatcattctcagcaaactatggcaaggacaaaaaaacaaacaccgcatgttctcactcataggtgggaattgaacaatgagaacacttggacacaggaaagggaaaatcacacaccaggcctgttgtggggtggggggaggggggagggatagcattaggagatatgcctaatataaatgatgagttaatgggtgcagcacaccaacatggcacatgtatacatatgcaacaaacctgcacattgtgcatgtgtaccctagaatttaaagtataataaaaaaaataaaaaaataaaaaaataaatagatgttctgtaaaaatatacacaatttttacagacaaatacatttataagttgtttttatcttaaaaattggggatatttcatatttataactaattattgaaccttaagttttcttggccatttataggctaataaactaagaatcatgtaaactaagccaaagtagaatagacataaaagtcctaacacttcaacttcctatccttcaagaagtatacctcgcaaagctcatttgagagaggaaaagctttcctccaccctctgttttacagcgctgaggtttctcatcacatttctatgacttatagcttaaatccatgttacatggtcactggcattgttagtgcttctcttttaatactgtagaaattaatcaatttggtggcgtatttaattaattctatcactagaggattgtaaaattacatatatgaatacctcactttagagaccacttaattttttttccaaggggatatttgactatatttcacttgtgtcttatttaatgattttataatttaaaccctaaattataaatctagaatttagagagtatatttccccactggattacatttttggaattattatatgtgcacaaatattacaaaatcactgtagacacctgaaaactatattatcttttaaaagcaatatttacattaaactggtataacaaaattgtttggtgcattttttccagtacattttgtatatattacatgtttaacctttttttattcagcaaataatttttgagtatctactaagtgctaggttctgcattactaattgaatttaaagagtgaaataacagacatggtctcagacaataaaaattaacattaggtcacctatttacatattttaaaatggtaattatgaaaactttgagattttaaactagataacattataataatacacttgatgttgttaatatttgccagtgagcaaaaaagaaaataaaaagatggttttattcaatatacactttaaaattgcagaaaatagtcaagtttctctgctttgcagtttaatgtctatgtgtttttctctgcaacttggcttttgtggagtgaaacaattattcttccagcccaataaaggcagaagagtaacaataaatctaatattttaaatgcttatcaaaagatagtaaacatattatttcagaatactgagttcaataagttgacctacaaaaaaagccaaactgacagtattactgaataaggaaaggcccaaagagacaaaatactttttattttgtaacctcggtatgatacaacttaccctaactataaagaccctaaattaccaagatgggtgcttataatatggagagtaaaaaaagtcatttcacttttagcttttttatttctctcagaataaaaagtgtataaggagtttataaagaagttgatactataagttagtactacaaagacagcacttttcaagaaaagacttttttctctcttacaaatatcatgttagcagtatttgttttctccagaaataatgaggaaataaaaacataagtatgtgggtaattagtgtagtttcttaaagaaatgagttaggcaacaggctaataatgtatacttcgctggcttttgaatgccaacaatcatattctttataaggcacagagaagatttttctgaagaataagtatgtgaacctgaaaagtaatcgccacttggtagtgacaatatggatagggtgaagggcgtcatcaagaagcaatgaaaagatacatttgcagttaaatttgaaaaccatgatgtttaatacatatagtaataaagaatactttctcctatttcaaaattattttagaattaagatagaagctaaaatacctagggataatgatatgactatcaaaaattaaaaattaaaggacattttgagtattataagttaagaatgagaacttattacccaaagaacaggggataattcattatgctccatatccattgaattaaaagacaggcccattacctggataatttgaaagtttaattttatttaaaagtcttgtttcattcatcaagctaaaggattagctcccagaaatattctaggattgcatatccccaactctgtaggaagtatagaaagaatgttataagggccaccatctaaacattattatgtaaataatttagtaccattccatttgcctttgtagatttaaaaatgtaaatggctttctcatattaggaaacatcacttttcaaaacccagataaacatagtatattgcaagagaataattattttctttattaaaaaatactggatgctaagtccaaaagacataaattattttatactaataactactaacattttattcattaaaatataaaggtcaaagattttaaaatgatctttaaatgattaataacatgttgatctttttcttctttctgtaaacctttttgagtcttaacaatactaaactatacaagcaatattaaatagtatataaacggattaaaatattcaaatttactagaatgtggacattggaaagaatgaaaataaacagaagcataaagcagcagatataaaattaagaaagcaactaagagtgtttaaagtacatattcatctgtagtctaatgtctaccataaacaatgactcttctcagtaaaacacaaattgttcatgaagggaaaaagcatgttgtattagagaatattcaacataatttttttagtactaacttgtgcctggagtattattggtttttccattatgaacttatgcacttgataatttttttcataaaaattgtatgtacaactccattcaaaagcagtttttggtgggttttttttttttttttgagatgagttttgctcttttcacccaggctggagtgcaatggtgcgaatttggctcacagcaacctagcaacctttgcctcctaggctcaggtgattctcttgcctcagcctctcgagtggttagaactacaagcatgcaccaccatgcctggctaattttgtgtttttagtagagacatggttttgccatgttgaccaggctggtcttgaactcctgacctgaggtaatccgcccaccttggcctcccaaagtgctgggtatgggcaagagccaccatacctggcctcaaaagcagtttttaaaagcaaacacaatataacaccaaagttgaaaaatctatgctcacccaaggatgccaggtttaataaattatttatagaatactgcatcaaaaataagacaataacccaaaatataccattaaagatgtatccactcctacaactagagataattaatctatctggtagcaaatgatacttcaatcagtttcagcatgtctgaaatctttaaggacaaaagtgataaaacatgacttcattcttcattagactcttagaacacttgaaggaaaataatttctgaagcacaaagaggtaaagaggtgtaatctttcaaaaagatattcagtgttcaaaatccaagagtgcaatatcaggctgggtgcggtggcttatgcctgtaatcccagcactttgggaggccatggtgggtggatcacctgaggtcaggagttcgagtccagccaggcatggactctggctgtactaaaaacacaaaaattagccaggcatggtggtgtgcacctgtagtcctagctacttgtggggctgagacaggagaatcgcttgaacctgggaggtggaggttgcagtgaaccgagatcatgccacctcactccagcatcagtaacagaatgagattccatctcaaaaaaagaaaagagtgtaatatcggtatacacagataatatactgaatgaaacaaatagaataatttgaagaggtatcttgatgaacaaggagtcattagaaaggttgtattcatgtctttgaaggaaattgcaatgtgagaaattaatactttgactactatactaaaagtttattgctaacatgtattgagttattaacgtgtgttaggcagagtgccatataatttacaagtgttatctcatttattgcaggtgaaatgtaatttcgaactctggaagtataaatgaattagatagaaaaaaattctatttaaatggccaccagtaaatcggtatctaggaacagggtgatacagtgcccaagttttctattcttactaaatgttgtgtttcattttcaatgttttcttggatattgctcttttttggtgattttgatttttttttattttagaaaactaataaattgactcttcttggtactgactcgggttttatagaagaaaaagtaaattctgtacatttacctttacctcatctttttctcttttaaatttactatattttttattttttttgtaattttattttatttttctatgattattatttttattattattatactttaagttttagggtacatgtgcacattgtgcaggttagttacatatgtatacatgtgccatgctggtgcgctgcacccactaactcgtcatctagcattaggtatatctcccaatgctatccctcccacctccccccaccccacaacagtccccagagtgtgatattccccttcctgtgtccatgtgatctcattgttcaattcccacctatgagtgagaatatgcagtgtttggttttttgttcttgcgatagtttactgagtatgatgatttccaatttcatccacatccctacaaaggacatgaactcatcattttttatggctgcatagtattccatgttgtatatgtgccacattttcttaatccagtctatcattgttggacatttgggttggttccaagtctttgctattgtgaataatgccgcaataaacatacgtgtgcatgtgtctttatagcagcatgatttatagtcctttgggtatatacccagtaatgggatggctgggtcaaatggtatttccagttctagatccctgaggaatcgccacactgacttccacaatggttgaactagtttacagtcccaccaacagtgtaaaagtgttccgatttctccacatcctctctagcacctgttgtttcctgactttttaatgattgccattctaactggtgtgagatggtatctcattgtggttttgatttgcatttctctgatggccagtgatggtgagcattttttcgtgtgttttttggctgcataaatgtcttcttttgagaagtgtctgttcatgtccttcgcccactttttgatggggttgtttttttcttgtaactttgttggagttcattgtagattctggatattagccctttgtcagatgagtaggttgcgaacattttctcccattttgtaggttgcctgttcactctgatggcagtttcttttgctgtgcagaagctctttaattagatcccatttgtcaattttgtcttttgttgccattgcttttggtgttttagacatgaagtccttgcccatgcctatgtcctgaatggtaatgcctaggttttcttctagggtttttatggttttaggtctaacgtttaagtctttaatccatcttgaattgatttttgtgtaaggtgtaaggaagggatccagtttcagctttctacatatggctagccagttttcccagcaccatttattaaatagggaatcttttccccattgcttgtttttctcaggtttgtcaaagatcagatagttgtagatatgtggcgttatttctgagggctctgttctgttccattgatctatatctctgttttggtaccagtaccatactgttttggttactgtagccttgtagtatagtttgaagtcaggtagtgtgatacctccagctttgttcttttggcttaggattgacttggcgatgtgggctattttttggttccatatgaactttaaagtagttttttccaattctgtgaagaaaggcattggtagcttgagggggatggcattgaatctgtaaattaccttggggagtatggccattttcacgatattgattcttcctacccatgagcatggaatgttcttccatttgtttgtatcctcttttattttgttgagcagtggtttgtagttctccttgaagaggtccttcacatcccttgtaagttggattcctaggtattttattctctttgaagcaattgtgaatgggagttcactcatgatttggctctctgtttgtctgttgttggtgtataagaatgcttgtgattttcgtacattgattttgtatcctgagactttgctgaagttgcttatcagcttaaggagattttgggctgagacgatggggttttctagatatacaatcatgtcatctgcaaagagggacaatttgacttcctcttttcctaattgaataccctttatttccttctcctgcctaactgccctggccagaacttccaacactatgttgaataggagtggtgagagagggcatccctgtcttgtgccagttttcaaagggaatgcttccagtttttgcccattcagtatgatattggctgtgggtttgtcatagatagctcttattattttgaaatacgtcccatcaatacctaatttattgagagtttttagcatgaagggttgttgaattttgtcaaaggctttttctgcatctattgagataatcatgtggtttttgtctttggctctgtttatatgctggattacatttattgatttgcgcatattgaaccagccttgcatcccagggatgaagcccacttgatcatggtggataagctttttgatgtgctgctggattcattttgccagtattttattgaggatttttgcatcaatgttcatcaaggatattggtctaaaattctctttttttgttgtgtctctgcctggctttggtatcagaatgatgctggcctcataaaaagagttagggaggattccctctttttctattgattggaatagtttcagaaggaatggtaccagctcctccttctacctctggtagaattcggctgtgaatccatctggtcctggactctttttggttggtaagctattgattattgccacaatttcagatcctgttattggtctattcagagattcaacttcttcctggtttagtcttgggagagtgtatgtgtcgaggaatttatccatttcttctagattttctagtttatttgcgtagaggtgtttgtagtattctctgatggtagtttgtatttctgtgggatcggtggtgatatcctctttatcattttttattgcgtctatttgattcttctcttttttctttattagtcttgctagcggtctatcaattttgttgatcctttcaaaaaaccagctcctggattcactaattttttgaatggtttttttgtgtctctatttccttcagttctgctctgattttaattatttcttgccttctgctagcttttgaatgtgtttgctcttgcttttctagttcttttaattgtgaggttagggtgtcaattttggatctttcctgctttctcttgtgggcatttagtgctataaatttccctctacacactgctttgaatgcgtcccagagattctggtatgttgtgtctttgttctcgttggtttcaaagaacatctttatttctgccttcatttcattatgtacccagtagtcattcaggagtaggttgttcagtttccatgtagttgaatggttttgagtgagattcttaatcctgagttctagtttgattgcactgtggtctgagagatagtttgttataatttctgttcttttacatttgctgaggagagctttacttccaagtatgtggtcaattttggaataggtgtggtgtggtgctgaaaaaaatgtatattctgttgatttggggtggagagttctgtagatgtctactaggtccgcttggtgcagagctgagttcaattcctgggtatccttgttgactttctgtctcgttgatctgcctaatgttgacagtggggtgttaaagtctgccattattaatgtgtgggagtctaaagtctctttgtaggtcactcaggacttgctttatgaatcttggtgctcctgtagtgggtgcatatatatttaggatagttagctcttcttgttgaattgatccctttaccattatgtaatggccttctttgtctcttttgatctttgttggtttaaagtctgttttatcatagactaggattgcaacccctgcctttttttgttttccatttgcttggtagatgttcctccatccttttattttgagcctatgtgtgtctctgcatgtgagatgggtttcctgaatatagcacactgatgggtcttgactctttatccaattttccagtctgtgtcttttaattggagcatttagtccatttacatttaaagttaatattgttatgtgtgaatttgatcctgtcattatgatgttagctggttattttgcttgttagttgatgcagtttcttcctagtcttgatggtctttacattttggcatgattttgcagtggctggtactggttgttcctttccatgtttagcgcttccttcaggagctcttttagggcaggcctggtggtgacaaaatctctcagcatttgcttgtctgtaaagtattttatttctccttcgcttatgaagcttagtttggctggatatgaaattctgggttgaaaattcttttctttaagaatgttgaatattggcccccactctcttctggcttgtagggtttctgccaagagatccgctgttagtctgatgggcttccctttgagggtaacccgacctttctctctggctgcccttaacattttttccttcatttcaactttggtgaatctgacaattatgtgtcttggagttgctcttcttgaggagtatctttgtggcgttctctgtatttcctgaatatgaacgttggcctgccttgctagattggggaagttctcctggataatatcctgcagagtgttttccaacttggttccattctccccatcactttcaggtacaccaatcagacatagatttggtcttttcagatagtcccatatttcttggaggctttgctcattccttttaattctgttttctctaaacttcccttcttgcttcatttcattcgtttcatcttccatcgctgatactctttcttccagttgatcacattagctcctgaggctttgcattcttcacgtagttctggagacttggttttcagctccatcagctcctttaagcacttctctgtattgattattctagttatacattcttctaaatttttttcaaagttttcaacttctttgcctttggtttgaatgtcctcccgtagctcagagtaatttgatcgtctgaagccttcttctctcagctcatcaaagtcattctccatccagctttgttctgttgctggtaaggaactgcgttcctttggaggaggagagcgctctgctttttagagtttccagtttttctgttctgttttttccccatgtttgtggttttatctacttttggtctttgatgatggtgatgtacagatgggtttttggtgtggatgtcctttctgtttgttagttttccttctaacagacaggaccctcagctgcaggtctgttggaataccctgccgtgtgaggtatcagtgtgcccctgctggggggtgcctcccagttaggctgctctggggtcaggggtcagggacccacttgaggaggcagtctgcccgttctcagatctccagctgcgtgctgggagaacaactgctctcttcaaagctgtcagacagggacatttaagtctgcagagattactgctgtctttttgtctgtgccctgcccccagaggtggagcctacagaggcaggcaggcctccttgagctgtggtgggctccacccagttcgagcttcccggctgctttgtttacctaagcaagcctgggcaatggtgggcgcccctcccccagcctcgctgccgccttgcagtttgatctcagactgctgtgctagcaatcagcgagactccgtgggcgtaggaccctccgagccaggtgcaggatataatctcgtggtgcgccgttttttaagtccatcggaaaagcgcagtattcgggtgggagttacccgattttccaggtgccgtccatcacccctttctttgactcggaaagggaactccctgaccccttgcgcttcccaagtgaggcaattcctcgccctgctttggctcgcgcacggtgcgcgcacccactgacctgtgcccactgtctggcactccctagtgagatgaacccggtacctcagatggaaatgcagaaatcaccgtcttctgtgtcgctcacgctgggagctgtagactggagctgttcctatttggccatcttggctcctcccccttaaatttactttaattgacatataataaatgtacatgttatggggtacagagtgatattttgatatatttatacgatgtgtaaagatcaagtcagagtcattatcatatccattacctaaatcatgtattatttctttgcagtgagaatattcaaaatcttttattttagttatttgaaaacacacaataaattcccattaactacagtcacccaacagtgctgtagagaactagaacttcttccttctctccagctgtaattttgtatgtattaaccacatttttcttatactcttctttctcctactctttccaggatatggtaaccaaaactctactatctacttctacgggattaaaaattttagcttccatacataagtgagaacacgtagttatgtggtgtttatgtttctatgccaggcttatttcacctaacataatgccctccacttgcattcttgttgccacaaataacaggattttgttctttattatgactaaataatattccattatatatgtatgtcacatttctttatccattcatctgttgatggacacttttgttgattccatatcttggctattgtgaatagtactgtaataaacatgggggtgcaggtaactctttgatatactgattttctttcctttggatatatactgaaaaccatatgattaaattaataaacacaataaaagcgtttggcaaaattaaatattcttacatgacaaaaaacctctcaacaatttagtatagaaaatatatgccttaacacagaaggacataaaggacaaatctacagctaagatcatactgagtgtggaaaacgtgaaagattttactgtgaacaagaaaaagattttactggaacaggaaaaggatgcctattctcaccaatcatatttcacatagtgaaagtcttagccaggacaattaggtgagagaaagaaataaaggacatctgaattggaaaggagacagtcaaactgtccctgtttaaagacaatgtgatcttatacacggaaaaaaataagactctaccaaaagcttcttagggtgatacatgaaattaataaagttgcaggatataaatcaacatacaaaaatcagtagcatttctatatattgatagtaaactagctgaaacaagaaattaagaaagcaattccttttacaatagctacaaaaatgtacttagaaataaatttaaccaaggaagtaaaagatttcgacaacaaaaatgacaaatactaatgaaagaaattaaagaaaacacaaaaaaggaaagacatccacgtttatagattgaaataatattcttaaaatgacccactatcctatgtgatttacaaatttagtacaatcactagcttgtatttttaaaagcacctttgctgcatattcttaagatattcaatgacaatgcctggatttaagtttgaggtattattatatctattttatactgggcacaatataatgttatcagaggtaatggttttgattggtcctaggtcatacagtaatatatacattgtgatttatagacatgctatcttttaatactcaggcatttacaaagttcatttagacaaagttataaaaacttgccttcctttccgcctatatcacctaaaaatcctaatttaagaggtaataacattttttgatatacaatttatcaacacaataaaaatctaacaattatcatgtgcagagtgtgaaaatctcatcagattaaggaacacaaagacatctttttcatatttcgaatgtaaaactgttttggaaactgttatttttagaaacagttaaaaacattttttcattagtttttcatgtaaaattgtgacaaccagcatgaaataactgtcatcacagaagcatggtatattcgattccaaaacatattctttgtaagttttaatatatttatgtattatttatacttacattgtaacccataatgtacagatattatttttccttcaactcttaagaatattcttaaataataaaaaattaatgatttataatttttgttggttgggaaaaagaatagacacacacgtgacagtgcatcacttcacctcatcatttcatctcatcattttatctcatcatttcatctcatcattttatctcatcatttcatctcatctcatctcatcccatcatttcatatcatctcatttcatcaaatctcatctcatctcatttccatttcattttcattatttcatttcatcatttcatttcactatttcatttcatttcatctaatttcatttatttcattatgtcatttcatatcatctcatttcatttcatctcatattttttatatcatttttcatatcatttttcatctcatcatttcatctcaattcatttcatctcatcatttcatctcctcatctcatcatttcctcctttcaacatttcatctcatttcttctcatctcatttcaatttcatttcattatttcatctcatttcattatttcacctaatttcattatttcatctcatctcatctcaattcatcatttcatctcatttttcatctcatcatttttcatctcatcatctaatctcatttcacttcatttcatctcatcatttcagctcatcatttcatgtcacatctcatttcatcatttcatttcaacatttcatttcatctcatctttcaatttcatttcaatatcatcatttcttttcatttcatctcatttcattatttcatttcatttcatctcaccatttcatctcatcatttttcatctcatcatctcatctcatcatttcatcatttcatctcatttcttctcatcatttcatctcatcattttatctcatttcatctcatctcatttcaatttcatttcattatttcatttcatttcacttcatttcatctcatcattttatctcatctcatttcatctcatttcttctcatctcatcatttcatcatttcatcttgtttcatctcatttcatctcacctcatctcatcatttcatctcaacatttcatctcttcctttcatttcatctcatcgtttcgtctcatctcatctcatctcacctcagcatttcatcatttcatctcatcatttcttatttcatctcattttatctcatttcatctcatatctcaattcaatttcctttcattatttcatttcatctcattcatttcatctcatttcattacatctcatcatttcctctcatcattacatctcatctcatctcatcatttcatcatttcatctcatcattgcatctcatcatttcaaatccatcattcatctcgtcatttcatctcatcatttccatttcatcatttcatttcatcatttaatttcatcatctcatttaatttcacctcatttcattatttcatttcattttttcatttatgtcatttcatttcatctcattacatttcgtctaatttcatttcatcccatttcatctcatcatttcatctcatcttttcatctcatcatttcatctcatcttttcatctcatcattttatctcatcatctcatcaactcttttcatcttatcatttcatcatttcatctcatctcatatcttctcatctcatttcaatttcatgtcattatttcatttcattatttcatgtcatctcatctcatcatttcatctcatcatttcatcattttatttcatcatctcatcttatcatttcatctcatttcaattttatttcaatttcattatttcatttcatttcatctcatcagttcatctcatcatttcatctcatcatctcatctcatcatttcatctcatcactcatctcatttcatatcatcattttatctcatctcatcatttcatctcatttcatctcatctcatttcatcattacatctcatttcatctcattttatgtcatcatttcatgtcatcatttcatcacatctcatcgtttcatctcatcatttcatcatttcatctcatttcaactcattgcatctcatctcatcatttccatttcattattccatttcatcatttcatttcattatgtcatttcatctcatcatatttcatctcatctcatcatttcatttcatctcatcatttcatctcatcatttcatctcattttatctcatctcatcatttcatcatttcatctcatcatttcttctcatctcatcatttcattatttcatttcatctcatttcattatttcatttgtcatttcatctcattacatttcatctcatcatttcatccatcatttcatttcatcatttcatctcatgatttcatctcatctcatctcgttatcgcatttcatctcattattgcatctcatttcatctcatctcatcatttcatttcatcattacatctcatcatttcaactcatttcaatttcatttcaatttcatcattacatttcataatttcctttcattatttcatttcatttcatctcatttcattatttcatttcatctcatttttcatctcatttcatctcatcatttcatctcatcattcatctcatttcatctcatcattttatctcattatttcatctcatctcatctcatttcaatttcattatttcatatcatttcattatttcatttcatctcatcatttcatctcgtttcatctcatcatttcatccatcatctcatcatttcatctcatttcatctcatctcatctcctttcaatttcttttcaattttgtcatttcgtctcatcatttcatctcatcgtttctactcaccatttcatctcaaaatttcatctcatcatctcatctcatctcatcatttcgtcatttcatctcatctcaagtcatcttatcatttcatctaagtgaaatgatgtaatggaatcatgaaatgaaatggataggatgccctcagtgatgttaaatttaaaaattgtttcttttcatgtatgcatttttatatttatatgtatttatatttatatttacttatatttctttttacttatttttatttatatttttacttatttctttatttatagacaaggtcctgttctgtggcctaggctggaatgcagtggtgcattcacagttcactgcagcctcgagcaaacctcccaccttagcctcccaggtggctgggaccccaggtgcacaccaccacacctggttaatattttattatttgtagagatggagtcttgctattctgcccaggctggtctcaaactcctgggctcaagcaatcctcctgcattggcaacccaaaatgctgggatgacagatatgagccacagtgcccaacctatttatttatttatttatttaataaggacaaggtctcactatgttgcccaggctggtcaactcctggactcaaatgattctccaaacgtggcctctcaaaatgttgggattacaggtatgagccaccatgcctggctaaaaatagtattatatttttgtatcatataattttcaattaggtaatatgaatattctgtacaggaaatacgcccttaattacataggaataaacatttgttacactgagaaaaatctaacagagctaaaaataaaaattaatttggaaaggtcattagatactgacacattcttacgtttatacattctttcatatattcatatattcttttaacagtatcaatggtttggagttatgtgtacaaaaccatgacctatatgtaatacaactaataacaggcacttacaattcaaggcatattatatacaaagctttaacttcttatcaaaatattttgttttttttctttctgttttggcagatactatgaatacaacattcaactcacagacaccatggagcccttactaagcataaagtactgtgaaaggccagggctaggacagaactgagacagggccagggataggacagaaccggggcagggtcatggccagagaaaaaccaggggcagggtcacagccagggacatgagaggaccaaggccagggccagaagcagggcagaaccagggccagggcagggacatggcagggccagggccatggcaggatcagggtcagcagaaggccagggcagggctagggtagcacagggccaaggcagggcagggtcagtgtagagcaaggaacgggccagggtatggcagggcagggacagggaggtccagggccagagtcaggtccagcacatggacagggcagggccagaaacatggcaggaccagaaaggggacagggcaagggcaaggccagagaaggaccatggaaaaaacatggccagggagggtccagggcaagggcaaggccagggcagaaccagagccagggcaggccaaaggcagggccagggcagggcaaggccagggtagggtggggccagggtagggtgagggtagggccagggcgagttcagggccagggcaggactaagatagcacagggccaaggcagggccagggcagggccaaaaggaggggccagggccaagcatggccagtgtcagacctggggattgtcagggccagggtcagggtcaaggctgggccagggacagggccagagcaagggcagggccagggagaaagcagaaccagagaggatccagagcaaggccagggtcagggaagaaccaggaccaggataaggcaaagccaaggccagggcagggcaagaccagggcagggcaagaccagggcagggcaaggccagggtagggccaggccagggtaggagaaggccatgatagggccaaggccaaggcagggcagggctagggtagcacagggcatggccaaaaacagggcagggccatagcagtggcaggactagcaacagggccagggcaagcgctggaccacagcatggtggggacaatacagggccaggacagaggatggcaaggcaggtccagggccatttcatggactcggtaggcctggggtcaggccagggcagggcaaaggcaaggccagggagaaggcaaggccggggccaaggcagtgccagggcagggcaggaccagtgcagggccaacgcagggtgagggcaaggccagggcatggaagggcagggcaggaccaaggggaagggccaggagagggccacggcagggtcacggccagaacaagggtatggctggggtcaggaatatggtaggacgagggctgggcccaggctgggacacgcagggcagagcatggcctgtgcaaggcacggccagagccaggccatagagatgggagggcaacaccaaggcagagtcagggtagatccagggctgagcagagtcagggcaggtccagagtcgaggcagagctagggcccaagcagggccatggtagcaccagggcagaggagggcagggcaatgcaggactgggccatggcagtgcctggtcaactccggggcagggccagaagcaggacagggccagggccaatgctcaggccagggacagggcatgacaggacgtgccagagcagggctgggccaatgttggggcaggacaaatcagaccaggacacctccaagtccagctctggccctgccttggccctggacccttcctggcctgaccttgtccctggccctgccctatccatgccctgtgtgtttgaccactgttttataaccagaatcctacaagaaacttaaattagttctttttgtgcatttttagtagagatggggtttcacaatgttgaccaggctggttccaaactcctgagctcaagccatctgcctgccttggcctcccaaagtgctgggattacaggagtaatctggccaagtatttaacttctttatgcctgtttcctacatttggaaaatggggatgctttaagtacctagcacatagaattattgtgagaatcaatgcctcacatatttacatattgataaaattatactcatagaacactactggaaacaaagacagtattagttaaaatttagtgattactgcaaatattattactattacaaacaacatagtatagacattactactactatagttatcttaaaaatctaaaataaaaattttacataatagcctaatgtaatctctcctgctctgccctggctcagccctagtgctggctctgcccctagtcctactacatccctggccctgacccttccctggtccagccgctgccctggcccttcccatcttcaggccttaccacggccctaccctggtcctgaccctgccctggtctggtcctgaccctggccctaccccacagaaggggtatggcagagccagggaagggccagggcaaataagtgacaggacacatccaaatccaggaaagggccagggctatgacagagccagggcaagtccttggcagggccaggttccaggccagggccaggaaagggtcatggcagggtcactgtatggccaaggtccaggccaaagccaaggcagtggcagggtcagggctgcataagggcaggaccagagccagtgatacggcagggccagggccagggccagggctgtgccaggacagaacaagagcagagcagggcaggaccagagccaggccatagagagagtagggcaaatgccaaggcaaggccagggtagtgccagggctgaggcaaggtcagggaaggtccagggctgagtcaaggctagaaccaagacaggggcaaaggccggggcagatctagggcacaagcagagcaggctagggcagggcaatggcaagaccaggccatggcagggccagcccaggatagaagagggcacaggcagggcagggccagggccacagctggggcaggacaaggaccaggaccggggtccaggccagggcaagggtatggccagggcagaggtaggccagagccagggtctgggcaggaccaaggcaggtctgttgcagggccagggttcagaccagggccagagcagggctgggacagggccagggccagaaccaggaaagggcaatgtcaggacaagggccatggcaggaccagcaacggggctggggccaggacagggtcaggaccagggctgggccagggtatggccttaagtagcgaagggccagggccagggtccatgccagtgccagcgccggtccagggcagacgcagggccatggccaggtctaggacaaggctggggcagggccaaggtctgggtcagggtcagcacaagaccaggacagagccaggggagggacagggccatggtaagaccagattaaatcagggacaagacacctgcaaatccacttcagggccagggtcagggcagggccagttcagggccagggccagggccaagacagggccagggttagggctcccagggtcattggcagggccagggtcagggctgccagggtcattggcagggccagggccatggcaggaccagggtcaggagcaggggtcaatgccaggccaaggccacacataggaccaggtctgtgctagggccagtgtgagggccaaggcggggtcagggcagggccaaagggagggcagggccagggcagggtgatgcaggcccagggtagcacagggttaaggtagggcacgaccaaccagggcaggtctatggctggggccggggcagggccagggccagggcagggccagagccagggcagggccaagacagtggcagctccagggcagggccagggttaggaccacggacatgtccaaggccagtgccagggcaagggcaagggcaggggcagggccaggttcatctaagaaccagggacaaagccaggcccagagatgggccaggacaggtacctggcagggctagggtctgggccagggccacggcagggccagggccacaaccaggtctgtgctatagccaggtccaacacagtgcccaggtaaggctaggtagaaggccaaggtagggccagggcagggtcaaagccaggctagggccaaggcagggccagggctggcaaggcagggccaggaaagcatagggccaaggcagggcagggccaggccagtaccaagacctgggcagggccaggggcagggccaggggcagggccacggccacagcctaggcaggaccaggttcggggcaggagcaaaacaagggtaaggacagtgcaggttcttggcacagccagggtccaggacagtgtcagggcagggccaaggcagggtctgggccttgataagaccagcaacagggctggggctaggccagtgacaggaccagagtcagggcaagggccagagcagtgcaaggccagggtagggccaggcatttcagggtcagggccaggggagaaccagggcaaggtctgaagcagggaagggccagggccaggacaggtccagggcagggccatgacacggccaggggctgcgttagggcaagggcagggccagagcaaggtaagggtcagggccaaggccagggtagggacagggcaagaaatatggcaggaccaggggcaatgccaaggccaaggctgggccagggctgagccagggctgagtcagggcagggcaaggcagggcatggtatggccagtgcaggacaggacaagagccagtccagagagagagcagggctgatgccaagaaagagccaggctagtgccgaggctgaggcagtgtcagagcatgtccagggcagggccggggccagggacagaaccgagccagggcacagccaagacagggtagggcagggaaatagcatggctgggtcagtactgggacagggcagagcagggcaaggcgatggtagcggcagggcagggacaggccaatgcagagccatgtcatgccggggccaggacacctccaagtccacttcaggcccagggctatggcaggacaaagaccagggccaggatcagggccaggtctgtgctagggccagctccagatgagggtctagcgaagactagggtgagggccaaggtaaggccagggcagggtcaaaggcagagtagggccaggtcagggtgatgacacatccagagcacaacagggcagggtgatggcaagaccaggggcagaccactgccagctcagggccaaggaaaggccagtgcagagccaggaaagggtctgggtctgaacaaggcagagcagggccagggccatggcagagtcagggcaggtccttgacaggaccaggttccaggccagggctagggcagcagcaggggcagggcctggataagggcagggccagggatatggcaggaccagggctagggccagggccaggccatagtgagggcagggcaaaagccaaggcagggtcagggcaggtccagggcaggtccagggagcggccagcaccaagcggggccaaggcacaaccagcgcagggtaaggcaggacaatggcaccactgggccatgacagggcaaggtcagcaccaggagagggcagaacaggcaggcccatggtggggccagggcagggatgggccaaagcagggccaggacatgtccaaggccaggtcagggccagaacaggagcaggaccatgaccattggcagggccagtgccatgacaggaccagggtcaggacaaggggcagggccagagccagggccagaaccaaggtcaggccagtgcaggttcagggcagggccagtgccagggcaagaccagggcagggacagggtagcacagggccaagacagggtcaggatgggaccagagcaggacagggccgagagtccaggtaacagtagagcaggtatagggcaaggcagggcagtacagggccagatccatggcaggcgcagggcaaagccaggcccattgccaatgcaccagccctccctacaaggctcctaccacctggccactgctgcagcccgtccatcgctgtaagcctgaaccccaaccctggctgcagccacctgccctcctagtgcggccgctctcctaccgctctggcgcactgcaatctccgtcactgccacccacccgcagcgaggcaagccgtggtgtcgcaggctcaaggtgtctcctcctcctcctggcacggagcagctgggcaggcaaagccagaaaagcctagaggaagatgtgaggggtggaagggttagagcctcaacttgtcatgccagccactgggtggcaggggccagtttcagcaaaggcactcacacccaccctccaaagtccagcctctccttttggcccaagctggccgggaactggggtctggggtgggtgctggagatatcacagcacccagctccccactccacaggaaccattgggcccaccggggctgcactcctcggggagcaggagaagcagaaaaattcagacccagccagccctccgcacccaggtgccaattcctgttccggacgcctccacgcacagggccctgtcccccatggtgtccccaggggtgcctggcagcctctgaggcacagacccagagtgcacaggcccaggaaccacggtgggtgtgggggctctgccatgctcaggattcccacgcaaacgctgtgtgccctgccgcattccagtatgaccaagagtgggtcgccctctggagtgtggagtcagggagaggagaaccactccttccttggatgccaactctgttgaccgccgccagcagtgcagcccctgatagcaccgaactcgcccccgctccacggctagtcctgccctcaatagcgccccccacctccgtcccccaatgccgccagtagcgtatacccgataatgccctaacctgtcctcctccatgggcactgaagccccagaaagcgcccataacccaccctccctgctgtgggcagtgcagccctgtacagtgctaccaaccagtacccctaatgcaggcaatgacaccctggatagcgcccccaacccaccccacactgcgaaaggtgcagccctggatagcccctgtcctaccactctgttcatgctgcagtctctgtcaccaccaccagcaaccacagtgaggcaagccagtgggccgcaggctctagcatccagcagccaggcatggagcagctctcgctgatggccggctcctaccactctgaccatgctgctgtctgtctccatggccatcttctttcactacaaaggaataaaactaggtatcaataagaaaagtaattttggaaacaatacaatcacatggaagttaaacactaccctcctgaataaatgactagcaggtcaatgaagatactaagacagaaattcaaaaatttcatgaaacaaagggtaatgaaaacacagtataccaaaacttgttacgcagaaagccatacaaaggcagagatttacagctacaagtgcctaccatccaaacaaaagaaaaacttcaaataaacaatacatcttaaagaactagtaaagaacaaactaaaccgaaaataagaaaataaataagatcgtagcagaaacaaaattgaaataaaaaacacacaagattaaacgaaaagttggttttctggaaagctaaacaaaattgacaaacttttaaccaggctaagaaaagagacaagattcaaataaataaaatcaacagattaaaaaaaggagacattacaactaatacttcagaaattcaaaggatcataactggctattatatgccaataaattggaaagcctagtagaaattggcaaattcctagatgcatacaacctacttaggttaaacaatgaaaacatccaagaccagaacagattggtaacaagtaatgagattgaagccatcagaaaaagtctcccagtaaagaaaagcccaggaactgatgtcttcactgctgatggcttcacaccaaacaatttaaagacctagtacgaatcctgctcaaactattttgaaaaacaggagggaatacttccaaacttattctatgagaccattattactgtgataacaaaatcagacaaaagcatcaaagaaggaaactacaggccaggatctctaatattgatgcaaaaatcctcaacaaaataccagtgaatcaaattcagtaatacattaaagagataattcatcatgatcaagtgggatgtatccctgggatgcaagggtcactcaacatacaatgtgatacatcatatcaaccaaataaacgacaaaaacagtatgatcacgtcaactgaaaccgaaaaagcatttgatgaaattcaacatcccttcatgctataaatcctcaaagaaacgggcacagaagaaacataccgcaacataataaaaactacaggaaagacacccacagctagaatcatatggaatggggaaaaacggaaagcttttcctctaagatctggaacatgataaggatgccccctgtcaccactgttgtttaacatagtaccagaaatcctagctaaagcaatcagtacagcccctgatatggcccccaacccaccctgccccctaccaccagcagtgtcgcccccccgcaacagcacacccaacatacccaagccgccccgcctccccgcaccatgggcattacagcaccccatagcgccctcaacccgaaaccgccacccacccccccaccgcccacagccgcacagtgcagccccggatagcacacttagcccacctcactgttgccagcaatacagtctgggatagtgcccccaaccggctccccgccaaaggcagtgcagccccggtttgggcccccaaaccatccccccgtgcaggcagcacagccccagatagcacacccaaccagccacccaagacgggcagtgacgcctgagatagggctcccaaccggtcccaggccacccgcagtgcagcctggatagcgcgcttaccccaacgcctttctacgctctggctggctgcagtgtccatcgctgccaccaaccacaaacagggctgcaaacaggaaggattttattcaccgtcgatgcggccccgaggtgtcccaaagcgaggcagtgcccccaaggtctgtgcagagcagaacgcagctccgccctcgcggtgccaccggcccgcccgcccgggtctgtgctgaggagaacattgctctgccttcgctgtatctccgaagtctgtgcaaaggagaactcagctccgccctcgcaaaggcacacagcgccggcgtggcggagaggcggacagcggcggagaggcggacagcggcggagaggcggacagcggcggcgcggcggagaggcggacagcggcggagaggcgcacagcggcggcgcaggcgcggagaggcgcacagcggcggcgcaggcgcggagaggggcacagcggcggcgcaggcgcggagaggcgcacagcgcggcacagcgaggcgccggcccagactccactccccagctgtgaaagggtaagaactgagggtggctgagactcggggttgttcagggcggggtgggctctggacccagcaggcccggcacccaggtcagggctccaggggaggccaggtgggcgaaggccaagaaggggccggggctggtcaggaagggctcctggtaaccagagcactttgcgtgagccagcgtgggaggaaggtgggctggatgagctagggaggcgccgggaggggccttggcagaggcgaccccctccgtcagcccccaggccactgaaccctgggtagcgagaaccgacaggggaggctgcatacagaggagtggaggctccccggctttgggggctctgagtagaagcatctagggggtccctcaagaggcccccaaacgcctccccatggtgagaaaagaaagcgcagagaggggcacggctgtgatttcttttattgccccaaatgtacttcatcttggtagatttctattggctttaaaaatgtgtgtgttttgctgttggggagtggggtgttatacggatgtcagattttgctggttgactgttcagatcttttgtaaatccttgctccttttctgcctagtttcactctgtcacttacattagagtgcggtggcacgaacatgactcactgcagccttgacttcctagggtcaagtacttcccctggcttaacctcctgagtagctggtactataggtgtgtgccgccacacctggctaaatttaaaattttttggagagatgaggccttgctatgttgcccaggctcgaactcctggcctcgagctatcctttgtctttgcctcccagagttctgggattacaggcatgagccactgtgcccggcctctgcctagttttaacagttgctaagaggaggatgttgaagtagatgtcttcttggtgggttaatccttttgtcattaagcagttgttatggtcacttccttttcaccccattggtgaaggaggggtccctgccctaaagtgtaggagatggctgaacacgacacctggcgtggatggatgagattgacagcagtgttttagtcacatatacccacagctcagaggaggacactgcatgccacacagggtcagatgggcaccgcactctgtagcggagtgagggctgtgggctgaggaagcaggcaggcttgatagtaacaagagcacacaatgaccaatggttcccgagggggaatgcagttggcttgtttgaataaattcatgggctggcagacaggtgaagtgaagcttcttaggctgaggtgcaactgtttggctgataaaagaactagccaggtggggagcctttcctgttgggtggcagggtagggggtgtctggtagaaacaggaaaacccacggctaggcctttggggccctgtgaggctcaaagatgtcaaggcagcataggaaattttagatcttaaaattcagcgaagaccctctccagctctggtaaattattttgcttgaagtctacttcatgagatattaatatattcactcctgcttccttaaaaaattaatgatttcacaggatatctttctccattcttttactttcaacctacttaggtccttaagtgagtttgaagtttcttatgaacagtatttagttgggccatgtgtttattataggctctccatcaatctgtcttttggtttatttagaccatttacatttaaggtgcttatagttacataattgcttatgtctgatgtttttattatttgctttttcgtttcctttttctttccctccatcttgatctatttctgtataatgttgttgctcgtatctctttgtatagtcttaaagtgtttgctctggatgttacaatatgtgtattgtaatacagtagtctactggtaccagtatttaccacttcaaagtgtggaaacctgccttgcatttatgtctctttaccttttccacttgtataaatcactggcttgagtattaggtggtggtatagtttttgtttcagtcgtcaaatgtgattttaagaactgtggattgtctcgcgtatgtatccacatttctggtctttcctttgtccctcctcctatagtcccatattcatcccttctgcataagaactttctgtagccatttttttgttttgatttttttgttttaattttttgtattgtggaaatgacagaacatatttctgtagccactttttagcatttctaaattgaccagtgacaaattcctatattctcttcctctgagaatgtctttatttctctcttcatttctgaagggtagtttcatgggatatagaatttgcagcgaacagtttttttgtttggttggtttttttgtttggttgttttttttttaaacacttgaaaatgttgtgccacttccttctggcctccatggcatttgagttggcgtgtccctacaggcattctgccatttttggtctttgtttttagttttgaaagtttaattggtgttgctttcttttggtatactttgaggtttgctcagcttcttgaatctgtaagtttatatctttcaccaaatgtgggaagcctcaggaattagttatttgcatgctttcacagctctggtctcctatgggactcagataacataaatgcggggttatcgtcccacaggtccgtgcagctctgttcatttgttttcaggttattttctctctcttgtttagactgggtgaattctgttgatcaggtttcagcttctctgattctctcctctgtcgtctccacttttactcaatagggcccatccagttagtttttttaaaatttctgttactggattttatatttctgtaatttccatttgattcttcagtttctttgctgatgttttcagttctttgattgttgccataggatttgtagttgcttgttgaagcatttttatactgactgttataagtgatgagtcagatggttccaacatctgcctatgtaatttttttatttttgcaggcagtcctcctgtttaggtttagtctgtaggtcttggtctactttgtgggctgtgattccaatggcaatttaatttcagagccttcatggtgttattttggtctctttggcttatatgtatcactgggattctcccaccagtccctgttgttgcccacctgagggaacaggggagccgccctaggctgggccacctgctgcagctaggtgggtggggaatggtggttgtcttggtgtgtggagctggttttcttgttgtggggaagatctcctttgatctgcggggactgagtctgcctgggttgccttctattgctacgttgggagttgggaaactctgggcctgggtcaccttcctattggatgaggtccagggagacacctggccactatgcattccctagtcctagagtccctcagcagcctttttctgtccaccttttggaattctccattgatcctctcctgtctattatttctagagtttgggttacatttcttaggagggtataatgtgttatcttctctagaccagaaatccttagtggtggtttcgggttgtaactgtgctaaagggagaattggcgtatttgtgatgtcgggtctttcttttcaaatgaggacatatcattattcagtatataatatttacaacacctacttccttgggttgaagaatgtggttaaggcaaggaaagtacttaacacagtgcctggtgtggagagcacttacgagtgttggtagtgatgctattccttttgtcctttggtagcctattaaagcttttcttcttttttaaaaaaataaagttccggtgcacttcttgttaggtttattcctattttatccttttttgcttttattgcaaataggagcttcctatcttttataacgtctacctggttctttggcccttacgtgaaaatgttttaatagccttctaaacattgttctctcaaatgagttttaatttgcctctttcttttgttttcctttttttgagacagggtctcactctgtcacccaggctggagttcagtgacgcaattatggctcactgcaacctctgcctcctgggcccccaaagtgctgggtttacaggtgtgggccactgcacccagccttacttgtctgtttcttttaagagtgggaactataattgagcccagagctccaaaaacaaatgaagaaatgaatgagtgaataagctcttcccatgggtttggtgtggtttgggactctactcttaatctaaatgctatgttttatataatctaaaatttcccctaggtgtgttacacgattgtgttgtgttgaacttacattgagactccttttcacatgtgctggttatcagcgtgggacttttccattcactctttgaattattcgtttgggggacacagatagacctctgtgtctttcataaagagtgtccattggccggttgcagtgtctcatgcctgtaatcccagcactttgggaggctgaggagggcagatcacgaggtcaggagttcgagaccagcctggccaatatggtgaaatcccatctctactaaaaatacaaaaattagccaggcctggtggcgggtgcctataatcccagctgctcgggagactgaggcagtagaattgcttgaacctgggaggcagaggttgcagtgagctgagatcgtgccactgcactccagcttgagtgacagagtgagactccgtctccaaaaaaaaaaaaaacaaaaacaaaagagtgtccattatctatactagaaaaattgagattgggattttgacatgaagtgcggaaatgtggattgggtccatttagtttacctaaacagatgatgaaatactaactgttttacgaagcattccctagtgcaaagttttgcctgtgtttctagtgatgggaacagtgagaatcagacttggaacacggagcgcattgtgggcctgtcgtgggtggggccagcagcacatgcatgccgggctgacagagcagcctttgggtgttcttttcccagaggagctctacggtgactttgaagacttggaaacaggggacgtgcacaagggaaaatcgggccccgatactcaggtatgactttgtcgtagctggctgttcttggtcattgtgttctgagagaggcccgcattgagaaatgcaaatcttacttgtgatgtgtgaagattgcagactggatggatagattccttcctaaagtgtggggatgtggggaccaaagagaagctttcttatttacttgttaagttttggactacagttactaccgtttcttgccatagtcatttgccaagtccactgtgatttttcactcacagaagtcttagcttctcagacttacattcaaccattgccatcattctcctctttttaaatttaagtgtcatttaaaagaatgaaatccctgttctccctaatatttctttagaacagggtctgggagcatctgggtgagggacatgtctgttatttttattctagtttgtgttcccagccagcttaaggaatagcagctagttgtaatgcagatgtaacaatttcctgtagcagtaccatgttattcagagacaaaggttatgttgtgttttgttttgttttattgataatgataacagatttttgctaagatttttgtttaaatagaactttaaaaaatctaatgtttaaagaaaagaccttcataaacatacacaaaattttttcttctggaaatttaagaatgaagatgtagagaaacaaggaagaaattgaccctgacgaagaagaaagtgccaagaaaaagcatttggataagaagagaaaattgaaggagatgtttgatgtggaatatgatgaaggagaaagcacatattttgatgatcttaaaggagaaatgcagaaacaagcacaggtgagaaacctcagttcctctcagccccttgtcaagactatcacatagtgtaggaatccctgactttctttgggtccctgcttcctatcctgcttctgtgcctttcacttggactcctgggtagatgcatgtgagtgtgtttattcatgcagtgagctcattgtttctacagtcagaaggtcaccagaaaaagatccatacctattttgtaacaagaattaggaaaccgaaatgactgagacatggtctctacttttgagacttttacaatgtagcgatctgagatagtgtgttcatttcagtgcaagccaatgctgcctattccgatcgctgctccctgatttgaatggcaggtgatcagtggcccgtgtggcttatggacacaccagagctcccaggggaagtgctctgaaaacatcctggtcagagttcagaaggacatgtggagtataaggtcagatgcggagataagggagatggtgtggccctcctgcccaggggtgctgagcaggttgctggaggcggtgatctcactctgaaggagacagacacagaaacgtatgtacagttgatggtgagcatctgagttgcgtcttgttagtgaggccaggagtgcctgtgtaagctggaacagattaggtatatgatttgtgaaacggagtttcatcctacgtcttcatctagtcaaaggactgtttcctgattaggcattagcttagtggttgctagtctgtgttgacctttgaaaggcatgactaggctaactctgaagttgttgcttcacaccatttacaatttaaaattacctagagccttgtgggccattggaaaagactgaatgtttcactctgaaatgggagtccttggagggttttgaccagagaagagacattcaggtaatcagatcactctgccaagagatcagtccagtggcacaaaccagagggctggcagtggagatgagacagagtcaaacccggattgagtttatttggaagctgggtcagtaggatttcctggtggactgaatgtggggtgtgtaagaggaaatgagggtggcgactggaagttcctggaagggtgggttgttgcaggttagataggaaaccgtctgcagatgcagttttgggaagatgatgtttggttcggctgggtatcatgcagacaagcggagtgtcaagtctggagagacaggtctggccagggacttagatgtacagccctcagcatgtagatgccacttaactctgtgaggtggccggggagtgagtgcagagtgactgggaggagcaagactggcatgggcgagatggggcgattgcggccgtgaggcctgagcagtgcctaggagggagagggagaagcagtgtgagcatgcaggcacgcaggagtccagttgtacacggaggcgaagcactgttcagatcccgctgcagtgttaactacggtaaaggcagagttgaccactggaggagtccttcagcgtggaggccttcagcgatcttggcaagcaccaattttcgtggatgtaggagaatgggagcagaggaactggaggctgcaactgcggaaaacttttgtggggttttgctgcagagagaagcagagaaatgaagcagttgttggtggaagaaatggaatcaaaaggttttgagatagagaacagagggaagagctgttggaataaagtccaggaagagtggatggtgtctagtgagcaagtgatgtgtggccctgagtagaggcacgtacaaatcacctgtgcctgagctgcccttagaactttctgtgatcatggagatgcacgtctgtgcttcccaatattgtaacattggccgcaggttgatatggaccacttccagtgtgactagtgtgattgaggaactgcattttaaatattatgtaattgtaattaattttaatttaaatagccacacgtagctcctctataggccaggtcagagctctgataaggctggatatgggaggaaaccctggtagagggttgactgtagaggttcttttggttttggagtgaatcaggaaacagccatcagctgagtgaaggtgagggtggtggtgggtgtttgaagacaagggaaaagtgtgaaagaattgtttggagaggaaggaaagaagatgtggactggggatgtttccaatgttcgagcacgcagggctccacagttatctacatttgctgtcccttggagcaggagagaagaaaacggttgggacatattctgagcagactgtagaggtaaaatacgtagtttttttttgttttttgagatggaatctcgctctattgcccaggctggagtgcagtggcacgatcttgactcactgcaacctccatctcccaggttcaagcgattctctcacctctgcctcctgagtagttgggactacaggcacgcaccaccacacccagctgattttggtatttttagtagagccagggtttcaccatgttggcgaggctggtttcaaactcctgacctcatgtgatctgcccgccttggcctcccaaagtgctgggattacaggcatgagccactgtacctggccaaatatgtagtatttttaataggataaagcctacataattctgtccacagttcctttacttagaaattgctcatttgttcatgttaatgctatgtttattacagataacagcatacaggttttccccccccaccccgtcatgtacagctgaatcatgcagaatttgaagatcaagatgatgaagccagagttcagtatgagggttttcgacctgggatgtacgtctgcgttgagattgaaaatgttccctgtgaatttgtgtagaactttgacccccgttaccccattatcctgggtggcttgggcaacagcgagggaaatgttggatacgtgcaggtgggtccctttgctgcatatttggtgcctgaggctctgtggatttcccctccatcaatcatcttaccctctcatccccctcagatgcgtctgaagaaacatcgctggtataagaaaatcctcaagtcccgagatccaatcatattttctgtagggtggaggaggtttcagaccatcccgctctgttatatcgaagaccacaatggaagacaaaggcttctaaagtataccccacagcatgtgcatcgcggagcagccttttgggataaaatatgattacaataacttgcctattgctgagattaaaccttacaggctgcgttattttagctttgtgcttttcctttcataaaattccactcctaagatttttctcttttctgggagcagggaggtggtttggagtatatacgtaaatctatatccaaatctaaatgtccatatccagtatgttaaactagaatctaaaatttgtggtttgctatatttctttttttccttttcctttaagaccctatcactccacagggaactggtttcttggcaatacagtctgtcagtggcataatggtaactatcttggatgatttcttttacagattggttttgagaaatatatcctgaatgtggattactatgtacatgagactttaagttgaaaattactcatttttattaatataaagtaaatttccctttgcttttaatcttcgtacatccttttcagtagggtgtgggattagaggaggggaggtggaagaattataatggtacatttcctatttttgtgcatcttttgcatttatttatctaagcaagtacttaagcagtgctcaccatgtgctaagcactgtatgaggttgtgaggagccatcagagaccacccagacacaagactccctgcagctgtgctggggtagcagtctgttcactccattttcatttgaccagtcaggcagggcagggtttactggtcccatttaacagagaagaaagcagaataatgagcagatggaatcttccctggaggtccaaattttaatttcctaaacattgcaactgtatttttcttttccatttcgttccaaataaatcattatagtaaaattacattcctctgaaatcactctcaggaaagtactcaagtagccttttttttttctttcttttttttttttttttttgagacagagttgcactctgtcgtccaggctggagtgcagtggcacaatcttggctcgctgcaacctctgcctcctgggtttaagcggttctcctgcctcagcctcccgagtagctgggattacaggtgtgcaccatcatgccgagccaatttttgtatttttagtagagacaggatttccccatgttggccagactggtttcaaacttctgacctcaggtgatctacctgccttggcctcccaaagtgctgggattacaggtatgagccactgtgcccagcctcaagtcacccttgttagtttggcttaccaactttaaagttttggattgcttttgtcaagccactgggttgcaagttcagatggtctttcttgtttttcttagctaattgtaagtaaaattcactttggtaatttattgtgtcacatagaattgaagtttttctcttgctaatattattcctattttcaaattttggggttcctgttagcctgattttcggatagctgccacataagttgtccttgatctggataaatccataaaaattgtgaagaaattaaagctaactggttttccatataaaatttttaagaacacttcatttattaaggtctgtatatctatatattctcatatttataaatctccatattgtttgagaaaaggaatgaaatacctctaaaatatgggcctcatatttttagaaaagtgtttgaaatcttttataaacttcatattttgtttgctcctttatattctgtattacttaaatatgctcagaaaagcagtggtaaacagctatttaggaattgaggctgttactcctgacttccatgtgagactgccacagaactcatattgaaaatatgtcattttatccactaggttttgtttcctactttttaaatttgtgttaagaaagggaaaaaaatcacaagtttgtctaactcagtagaaaaatcgacaaagcatttgcagacaacttggcaagggtacagagaaacggatgtactgtttttcagtatttggggagggtggtttgagcagcatttattgacaatttcattagtggggatgtttctattgaaaacagggttaggaagtcataaaatgttcctgcaatataaggtaataataccaccagcgtttatcttactgttttcatgttctaagtgcatgcatctgagtaaaaggatctgggctgcagtccagtctgagagatgccagcaaaggcttcctaggccagttcagtccagtaaatccctcttcgatcttctcttccacacagacagcagtgatgagcatgcccatgaactcacatgattattttggggaaaatgaaagagttgtattctttttgaggtagtaattccactttcaggggcaaatacattttgattattttatcacccttcagtgagttgtttttgttctttaatcaaggatgtatgtttgaagtaagaagtaaagcataaagtatatgattttgtgtgtgtgtgtgtgtttttatcttgctgtacctgtagggaatgtttaattcagccttggaagtggccaaatttgaaggtgctgtgattcgaactgtcagtgggataagggggcagatcaagaaagcactctgagctccagaaggagctttccgggccagctttgaggataagctgctgatgagcggtgagtgtcttaagtagtgttcagggcagggtgttaccattcatgcttgacttctagccagtgtgacgagaggctggagtcaggtctccggagagttgagcagctccagccttagatctcccagtcttatgcggtatgcccattcgccttgtgtctgcagccccctggccacacccagtaacagttctgtgatctatgagaatagttcccttagcgacctttcccttcaaatactttgcagccaggtagagaagtttggagtgaaggttttgttctttgtttcttcgcaatatggatatgaatcttcttttgaaaatattaaagtaaattacctcttttcagatattgtcttcatgcaaacttggtatcctgtttccatcccagccttctgtaacccagtaacatctttgttgaaaccagtgggtgagaaagacacctggtcaggaacgcggaccacgggccaactcaggcttgcccatggtgtcagactaaaggcaaacaaggactctctgtataaggtactggtcgtgtgtgtgttagtggagatgaagcctgtgctctacagacagggagtcacacagacacttttctataatttcttacgtactttgaatgttcaagtataaagtctaacattaaatttgattgaacaattgtatgtttgtgggatattttggagtggaacaccaaaaaatggtaatagtggttctttctggattgaagacaaacttttcttttttaaaataaattttattttatatatttgaggttgacaacatgatcttaaaggatacatatagatagtaaactggttactatagtgaagcagattaacatagctaccatctcacatagttagatttttgtttgtgtgacaggaacagctaaaatctacttatttaacaaaaatcccaaagacaatatatttttattaactatagccctcatgatgtacactagatctctaacttgttcatcctacatgtctgctactttgtattattttaatgtacatctccccatttcctattggtcatttcctatttggcccatttttcaactgggttgtttttctgctattaagttgtaagagttctttactgatttttggatattaacactttatcacatatgtggtttgcaaatatttcttccagtctgttggttcccctttcattttgttggttgttcctttgctgtgcagaggctttttagtttgatgcagtcctccttgtttatgtttacatttgtagcctggcttgtggtgcgatatccaaaaaattattgctaaggccaatgtcaagaggctttccccctatgttttcttctaggagttttatggtttcaggtcttatttgggtctttggtcttgtatctgttttgagttgatttttgtgtatggtgtatgatcagggtccaattttattcttttgcatgcgaaaatcctattattgaagagactatcttttttaccattgtgttgtcttgtttgcccttgtcaaaaattagttgacagtatatgtttggatttatttcaaaggtctctgttctgttccattggtctatttttttgtttttatgccagcaccatactgttttgattactatagctttgtaatacaattttaaatcaagaggtgtgatgcctccaactttttctttcacagtaatccgttggctgtttgggattttttgtggttccataagagtttcaggattgttttttcttttcttttttttttttttgaggcgaagtctcactctgtcgcccaagctggagtgcagtggcataatctcggctcacggaaacctctgcctcctggattcaagcaattcttctgcctcagcctcccaggtagctgggactacaggcacatgccactatgcccggccaatttttgtagttttagtagagacagggtttcactctgttggccgggctggtctccaactcctgacctcgtgatccacccgctgcggtctcccaaagtgctggaattacaggcgtgagccactgtgcctggccaggattgttttattcggttctgtgaagaatgccatcagaactttgatgaggattgtgttaaatctgtatatttgctttgggtagcatgaacattttaacaatattaattctcctgatccataaacacgggatgtcttttcattcgttcatgtctaaatttctttcatcaatgttttatggttttcaagtgtacacatctctcaccttcttggttaaatttattcctaagtttttgtttttctttgatgctatcgtaaatgagattattttcttgattgcttcgtcagctacgttatttgtatatagaaatgcaactgatttttatatgttgagtttataccttgcagcttaactgaattgatttagtagttctcacagttttttgtggaatctttggagtttttttacgtaaaggatcttgtcatctgcaaatagagataattttacttatttaatttagttgcctttttttcctcatctgattgctcttgcaagtattctattgaataaaagtgatgaggctggccatccctatcttgtactcaatcttagtggaaaagctttagttgttccccactaactatgattagactgtgggtttttcataaatggtctttattgtgttgaggaactttccttctatacataaactattaagagttttatcaagaaacgttgctgaactttgttaaatgcttttactgcatcaattgaggtgaccatatcgttttatctttcattttgttaatgtgatatatcacattgattgatttacatattttaaatcagccttgcatgccagggataaatcccacttaaacacgatgtataatgtttttgatatgttgttgaattctatttgctaaaatttttttaggatgtttgcatcagtgtttaatttattggagaagttgacctgtagtttttgtttgtttggtgtgtgtgtgtgtgtgtgtgtgtgtgtgtgtgtgttttggtttggcttaggtattaaggtgatactggcctggtaaaatgtgtttggaattatttcctctcgctctgttttttcgaagagtttaagaagtaaactcccaggggatgggagtgactctggacatgggagtgacatgatagtgactctggaccctgcagtggtgggacacagcagcatctctgtctctgtgaggccaggcgcagcatcagcaaggaccccagaatggtggagcactactgtggcttgggccctcgggggcagggaccagtgcagcaactacttctctccctggggaggcaggtgcctgggcaactcagattctccagagctagtccagttccaaggaagcagggttctacagttgtttgtcctgaagggcaaggtaccccagttcagccaatgccgttttcctgggatatgggggtgccatgttggctcatccctggcaggtgtggctgctcagctcagccaagacactgattccctgtgaagcagggcagcgcttcagctctcatgcagtggggggtgtgactgctcagactggccaaggcactgattccctggaaagcagggcaccaagtcagctcaggctccaaggggcagggcgcaatggcagctgggaggggaggggcacagcagcatggccctgcaggtggggtgtatgctgtgatgtggacatcatttgttcccaccagccatttgaaatttcatccatttgaaatttgattccaaatgtggtggtgtgggaggtggggcctagtgggaggtatttgggtcacagggcagatcctttatgaatagattaatgccttttcatgggactggattagttaccaggagtggattgttatcagagtgagttcagcttcctagactctcgtgtttcctctcttgccatgtgagccccttgcatacacctgtttccccttccactttccctatgagatgaagcagcacaagaccctcgccagttgtgctgcccaatctcggacttttcagacacaagcagggtgagccaaataaaccttttttataaaataagttaccccgagtctcaagtattctgttacagccacactaaatggcctaagacagtgtaacagcggctcgggggtggtgggccactaggtgggtgtgatatagagcaacaaagcctgaggatggaagaagggtgcggtggcagctcaccctgggtgggacatgctcccgaagtggtccaggtccaggagggcacgttgcagcagcagctggtccatgggggtggggcacaatgtcagttccttctctgaggggagtgctggggctactgggcccctcttgcttccttatccctgcagggagacatcccctctgcttcaggctgatccctctgggggaatgggtggtgggggccagatgtttccttccctcctttatgtgaccgtcctggttttctgtgctctgctggatttctgctactccttgatgcactctggggctctcttttagtgactttcatcaaaatatagatgtttgctgctttggctgtctttgtcaggggatgagtgcaaggggctattgatcagccccttgctggcatcactccctcttaaacttttcactgggtactcttttgaactattttttcccccaccgtatacatgtattttttaaacgttaatgtgctaatttctactgaagcaatgtggatttttctgaaagttttaatgttttaataagctttttattgaaatgttaatgtccacacagaagagtgcccgaatcataagtgtgcatctagatgaactgtagcacaccaggctgccacgccctggaccaagcagtagcctcgccctgtggcctctcccaggcactgctgccccaacccacagaatagctactttcccagttcctgatgtagatttgttctgcctggttttgacttctataaaatacagcacattctgtttagcctggcttctttggttcagtattacagaacacatccatgttcttgtctatggcagacattgatttatcgtcattgttgagttccattatatgactgtgtcaccatttttccattgatgagtaaaatgatttcctatttttggctgttatcccacggccctgaacactaggtctggatatgggacttgcaggtatgcaggggcacacgcacttctgctggaggatccctgggtggggtggagactccagggcacctgtgctctgcttcagtatggagtagttggagtgtattgcttagaacaaaagagatgagacactaacactgtgtgtatattctaaatcatatatcagtgaagaaatgtgatgtttgcaacatcttctctggggatgctaaccccctaagtcattattaccatgcatgtaagcacctcacctagatctgcactccatctagcagtgagaaattccaccataatctacacaccataatatcatcaatgtgtctagaagtcagatcctctatgtgtgaaccaagacaatgcctggcaaacaagacagctgggctctcaggtctctgcaccatggggaggtgtgtaaggccattcttgaattactataaagaaatctctgagactggatgatttacaaagaaatttacaaagaaatgttgaattgactcacagttctgtgggctgtacaggaagcttggtgctggcatctgctccttttctgggatgcctcaaggagtttttactcacggcagaagatgaagtaggagcaggcatctcacatggcagaacaggagcaggatagagagtgggtaggaaaggtgtcacaaatttgaacaaccaaatcccatgaaaactcactatcataaggtgaaaaccaacccaagaaggatactctctcatgacccaagtacctcccacaaggtcccacttccaaccttgtgaattacatttcaacatgagatttagtttagcatccaaactataccattattcccctggtctctaaagtctcatgttcttctcacatggcaaaatacaataatgtcttcctaacaatccccaaaactcttaactcattccagcatcaactcagtcgaagtccacagttcagagtctcatttgagttaaggcaagtccctttcacctataggccagtaaaataaaaaacaagttatttacttccaaaatacactggtagtacagacattgggtaaatattcccattccaagagagaaaaaactgccataaaaaaagggctacagatgtcatggaagtttgaaaccccgcagggcattcattaaatgttaaagctccaaaataatctttttttgactccgtctcccacatccagggcacactgatgtaaagggcaagctaccaaggctgagggcagttctacccatttggctacgcagggttcggcccctgtggctactctcataggctgttaagtgcctgcagcttttccaggtgtaggatacaatctgccagtagatctaccattctggaatacagaggacagtgacctccttcccacacctccactaggcagtgccccagtggggactcggtctggggcctccaaccccacatttcccctccacactgacctagtagaggttctgtgggagggttctgcccccacaacaggcttctgccttagcacccaggcttttccatacatcctctgaaatctaggtggaggttgttgaggctccagcactcttgcattctgtactcctgcaggtttaacaccacatggaagcttccaaggcttaacatggcttttgctccccaaaactgtggcatagcattatctggagcctcttgagccaaggctggagctgaatcagccatgaggttgcacaggactgtggggccctaggccagacccagcaagccattcagttcacctaggcctcaggacctgtaatgtgagaggctgcctcagagatatctgaaatgcctttgaggtctttttcccattgtcttggctatcaacacttggctcctctttagttacgcaaatacctctagcaagtgattgtttcgcagcccacttggattcttttcaggaagaggggatgttattttctgccacatagtcaagctgaaaatttttcaatcttctatgctctgctttccttttaaatataaattccaaattaaagtcatttctttgatctcacatctgagtataggctgtagacacagccaggccacctcttgaactctttctgcctagaaatttcttctgccagatactctaaatgattgttctgaagttccaacttccacagattcctagaacatgaatagaattcagccaaactctttcctaaggcataacatgggagatacttgccccagttcccaataagttactcactttccgtctgagatgttgacagcctatgcttcattgttcctaacaccatcagcattttgatcacaaccatttaaccagtctctataaagtctgaagcattttctaatcttcctgttgtgaacccccaaaattggacacaagtctcagttaactcagaaagcttattttgccaaggttgaggaggcacatctgtgacacagcctcaggagatcctgatgacatgtgtccaagatggtaggggtacagcttggttttatgcattttaggcagacatgagacatcaatcaacatgtgtaagatgtacatcagttcagtctggaaaggtggaacagctccaggtgaaggcaggacaacttgaagtggggaaggggcttccagtcttagatagataagagacacatggttgcattcttttgagcttctgatgagcctctccaaaaggaggcaatcagatatgtgtttctctcagtgagcagaggggagactttcaatagactgggaggcaggtttgctctaagcagttcccaggttgagtggggtcccaagatttgttttcctttcacactgtcttctcctgagccccccaaacccttccaacctctggccatgactgagttccacagctgcttttgtactatcaggtatcttttagccatactttatttaccaattatctgtgttaggacattgttgcattgctacaaagaaatttgttgggaaatttacaaacaaaagaggttgaattggcttatggttctgcaggctgtacaagagtcatggtgcctccatttgcttggcttctgaggacacctcaaggggattttacttggtggaacatgaagtgggagcagacatctctcatggcagggtgggagcaagaaagagagtaaggcaggaggttccacacatctaaacaatcagatcttgcaagaactcactcactgtcatgaggacagcaccaagcctcgcggaatccgcttcaatgacccaaccacctcccaccaggtgccacatgcaacattggggattacgtttcaacaggagattgagagaggacacacatccacactatatcaggaggtgtgtgccttgcaaccatcaggggatgctgcaggactgccctatggtccctacacagctgcttagtaagaaccattcactccaaggaacctgtgccctgtgctcaatgatggggactcaggagctgtgtcctctctggcctggcagagtcccctaagcagagacctgtgtatggtctcggcaggtgcttcctcccagggccctcccgagggggaaaccaaaccttcctcctcctcagtctggagtgtgagctaagcttcagctccagggctcagggaggggctgggcagtccttggatggaaacatatttgcatgagcagcccctcctctggcagaggatggagaagaagaggagacctggggcagctcaggcccactgttagggctcaggggctgtgtccaccatggcctggactcttctccttctcgtgctcctctctcactgcacaggtagggaaagtccttataaactgagtctcagtgtccaacctacaccatcccctgtggctcagacctacaagaagctttaccctgggaactgccttatcacccatgatgtctgtgttttcaggttccctctcccagcctgtgctgactcagccatcttcccattctgcatcttctggagcatcagtcagactcacctgcatgctgagcagtggcttcagtgttggggacttctggataaggtggtaccaacaaaagccagggaaccctccccggtatctcctgtactaccactcagactccaataagggccaaggctctggagttcccagccgcttctctggatccaacgatgcatcagccaatgcagggattctgcgtatctctgggctccagcctgaggatgaggctgactattactgtggtacatggcacagcaactctaagactcacacagtgctccagacccatgaggaagtaagacaaaaccctcccctctactctcctggtctagtgaaatcacccctgctggtggctctgaccaaatctagctcagggggtgacatctgttgtctcatcgacagcactggagctcccacggagaagtaggtctaacaaagtcctaccttgctcgcatttcacaggcagacatcccttgctcaggggtaaaatctctcagtgttgacattgaagaaggcaagagggctgggttggggttcatctcagctcagagtctagaagtgactcagagatgctgctggtctgagagttttaatatgagccttgggatacaatacagggatgcagatgggaattgtattctctatgtcagtaacgaaccatcagtaattgaaaagtcaatacattgagaatagcataaagcatgaaatactttaggataagtatgacaaaaattgttgttttacacactagaagtcctaaaacattgtttagacgcaggtcttaaagaagacctgagtaaatgcacagataatccttttttttttttttttttttttgaggcagagtttcactcttgttgcccaggctggagtgcaatggcatgatcttggatctcggctcaccacaacctccacctcctgggttcaagcgattctcctgcctcagcctcccgagtagctgggattacaggcatgtgccaccacgcctggctaatttttgtatttttagtagagatggggtttctccatgttggtcaggctggtctcgaacacctgatctccggtgatctgcccgcctcggcctcctgaagtgctgggattactggcgtgagccaatgcgcccagcccagataacccttttttttttttttttttttgagcaggagtctcgctctgtcgcccaggatgcagtgcagtggcgcgatcttggctcactgcaacctctgcctcccggttgaagtgattctcctgcctcagcctccctagtagctgggactacaggcatgtgacaccatgcccggctaatttttttttttccttgtggcaacggggtttcaccgtgtttggtcttgatctcttgaccttgtgatccgcccaccttggcctctcaaactgctgggattacaggcatgagccaccgtgcctggccccagataaccctttttatgtgagagtgtagagaatgttgctgcagctggtgtgggatgggggatggctgggttgagactgtgttgtcacctgcagtgtacacctgaggtgacatggttctgaacatcactttccccattgaaggcccgagtgacctatcacttgcttctcaaaattcaggaactaggtgactctaggagagtgcacaggaagctttctgcatattctttcaagagatttcgaggtcactgactcttttttcaagacttaaacacaaaatccacatccatcattcttgcgtaaagagaccattcttttttttttgagatggagtctcgctctgttgcccaagctggagtgcagtggcatgatctcggctcactgcaagctctgtcttctgggttcatgcccttctcctgcctcagcctcccaagtagctgggactacaggcacccgccgccatgcccggctaattttttgtattttttagtggagatggggtttcaacatgttggccagaatggtcttgatctcttgacctcgtgatccacccgccttggcctcccaaagtgctgggattacaggtgtgagccactgcacccggcccaagatggggtttcatcatgttgacctggctggtctcaaactcccaacctcaagtgatccactcacttcagcctcccaaagtgctgggatgacaggcgtgagccacagtgcccggcctagtacattgtttaaatggtgcatgtaaaacctcatggtactacaactgcctggtgacagactcaccagagtaaataactatcctgctgttctccaaccacatgggattccccaaacaaagatttgttgagtccaagatgcatcatgccagaactcttgcagtcatacacataatttgtttcattttaataaatacggttatcttttttcttcagtttattgtttttaatgtatcatcttctaggtttcattacacatcaaagatgaataatttctctcatctttaggacatgctgaaaacactcattagtgattttgaacagtattatttcctaaacatcctagttggaatggttgatcctaaaagctaccatgtgtcaggctcacctgagtgcagactgtggtctaaacaagctaaagttttaattcttccatcttcaaatacggagcatatttgcttgttttgctctttagcaaaacactgcaaagtcattcgccaggatctcctgcagactggcattcagtgatggagaacagactcctaggtgagatccctggtcacaggatccagatgactatgactgcaagtctggaaaagaagagacagaacaaagatttaccagcataaccctctgagaatgtgccccagccatcctggagggaagagctccctattgacccagcactgcagaatccacagaggaaggacagctctggccaccagggagcagccacacgacaagagaggacccggtgtccccacaggtgaggaaatgagtccatggggctggtcagtgctctcgatttcattctgccataacaggactttgtgtagtcaccacctgagtcctatacagtgaacagccaaggagacatggacagattcacccctgaggaacccagtagaatgtgaagtctgccctgaggtcacgaagaaaagactcggggggctgcctggcctggccctgatggagggggccatggacagaacaacggggaggcaggggtgtctctgagaggctctggtcaccttgtcatacaatggtggtgtacaatgtcgcaccatggacactagggggcgcctgcgcaccattcctgagaagactgggtgtgatgagagcaggaccagcgccacctgtcctgcttggtgccctatgcttagggctcacagatgtcaactctccaccccctgggaccacacagccccacccctggcactctctgacatcctcaggcagaggagcttgacccagggcccagggtgggatcagaaagctggagggtctgatttgcatggatggaccctccttctctcagagtataaagaggggcagggagagacttggggaagctctgcttcagctgtgagcgcagaaggcaggactcgggacaatcttcatcatgacctgctcccctctcctcctcacccttctcattcactgcacaggtgcccagacacagggtcaggggaggggtccaggaagcccatgaggccctgctttctccttctctctctagaccaagaatcaccgtgtctgtgtctctcctgcttccagggtcctgggcccagtctgtgttgacgcagccgccctcagtgtctgcggccccaggacagaaggtcaccatctcctgctctggaagcagctccaacattgggaataattatgtatcctggtaccagcagctcccaggaacagcccccaaactcctcatttatgacaataataagcgaccctcagggattcctgaccgattctctggctccaagtctggcacgtcagccaccctgggcatcaccggactccagactggggacgaggccgattattactgcggaacatgggatagcagcctgagtgctggcacagtgctccagcccaatggggaactgagacaagaacccccttcttcctcccccaggagggtgagtgccgccagctgctgctcacgcctgacctgtagcttctgctgctgcaggttctcccatgggccacggggcagccagggccctgcctaggagtggaggctccaccacttttgtcctcagagtcaggaacagggactccaggaatgagaatatcctgctcctgcagcttgggacacagggtctctgcactgacatcctgggctgaggtggcaggtccagctgtgtcttcacagtccttcctgtgcctgcccatggtgtggggagggagggagtggggaagggggtgtgggcctttgagcttcactagagacctgagggagcagaggtgctccccaagacctggactccttccctcaccctcctcccatcactctcctcactgtagctatggccaggtgagggctcagggctacttgaggaccttgctcagcccagggcctccatcccaggcattgtttccaaactctgtaagggctgtctctgaatctgtagaaacagttatttctatgtgcccaggactgggttagagggcaccaaccccaccccttgcaaactgctcctcacctcttagcgccccagtgaggagaagaaagagttagaaatcaggaatctactcagggctcccctctctcccctttcccagcctcccctggctttctctttctacagaaacaccaaggaggcagccaccaaggacgaggggaggcccaggcattataccaggcagcggagccagccagtccccccagatggtggagggaggtggtggaggtgtctgggaccagaaaatagtgaggaccctcttactgaagtgaggacgggtggcataaactgaggcccagatggtggaccagatctcctgagccatctactcatttcttcgtgtgttccagtttgggtaagaataggctaaaaaaaaaaaaaaaaggctttgaagaggttcctttcctcagataagaattcgtagaggattattgcccactcaggcattgaggggaggctgagcctcactctcaggccaatagaactgggggctttcaagggaatttgattgtactgagctcccagactctgacatctaagatttttgccctcgtagccgaacccagcactgataccaaaatggatgaaggctgatagataagcctagaatattctagctggcaccatctcgtggaaaagagaatcaagttagaatattgatgtgataaggtggcatcgcacagtgaggggaggagagcttgcatgggggagggtagaggagccactagagggctggacaaggaggagacagtctgaggtaagtttgtgaggaaaactccagatgcttcagagaagatggacaaggaggtaggcagtgtgaaggccatgggaccagctctagtcaccgggagagagtggtcagattcagcaccagtgtctggggaggaggtactgaagcctgggtgaggggagaggctcaaggctggccttaggacctgagtggggcacagtgatcacactgctggggggtccttcaagtgcaagggggctgcaggaaggcttgagctcattgtcacaatgaaaacttagacaacagctccccagccttgttcaaaggtgtcacaggactttttcctctccacatggcaacgtggagaagaaaacttatctctgagatatataagatgttagttctccataacctctcttgtcccctggctgaattcctatttggaaacaaaatgactctccagttttatatatgacatcctcacaaaaaaaaagttccagaatgagaaagatctgccctccctgacccactggtgaggaatctcagccttcaggacaaccagactaaatcattcatgccatctcccatgacagcatcatgtggaccagggagcctaccttatgggtttgggccacacactgcctgtccctagcattgcagctggggacacttacatgctgaactcatggctgggagatctgaggtccagacatgacaggaaaaggaaaaagaccaggagctctgcctaagtagcccccctgtgtgaatcactctaccctccaccctcatcttcagttcgtgatgggtattgtcttgtgaaaactgaaagctgggctgggacacaggcaagagagtctctgactcacaaatctccatcgtgggctctctggcctttctgatattcttttcacacatcaattctgggccaagacacatccatgctcatcaagaaggcattgataggagaatcaggtagcctccagagagacaggaagcagataaacaccctcatgttggcctcctaagcccagaggagaaaaaaaaaagttggaggggaagaagttcaagaagccacactagaagccactgattaccatcacctcggcacctgtcctccatctgcccctctttcaagtgaggaccagactcaggggacagcacctgcacctccccctctgtccatgcactgtgtagggagcctccttctgctctcatctcaaggtggctgctccgccaggtcagccgtatcactgctgagagtcttccctgggtcctggtcacagggtctgggatcagcagcaacctggctttgattcagctctgaccctgccccttcaggacacaaagcccattattaaagggataactgaactctcctagttcactcaaccttagattttccttctcagtgtccttctagaaagtgccgcctctactaaatgatttcatgttatttcctcaggtctagagctatttgatttccaaaattctatactcttctgttctcattcccggtcatggctcattttccctcagcagctaatgatgctaatcatgtatctaccccccattgtcacaaaaaagagagatggaagagttccttagataaatacagggttagcaaagaaaagtttcattatctcttaagaattactccaagatctggccaggcgtggtggctcatgcctgtaatcctagcactttgggagtccaaggtagacaggtcacgagatcaggagatcgagaccatcctggctaacatggtgaaaacccatctctactaaaaatacaaaaaattagccaggcatggtggtgggcacttgtagtcccagctactgaggaggctgaggcaggagaacagcgtgaacccgggaagtggagcttgcagggagccgagatcatgtctctgcactccagcctgggcaacagagcgagactccgtctcaaaaaaaaaaaaataaagaattactccaagatctaagaaaattaattccagttcttcaagagtttactcctcagaaacaacagcatgaatacattaggtagtgaatgttcttggtcttctcaatgaataacgtctgaaaggttcagagtatatgtttcaaaaaggtaagtgcataactttcaaaaaaatgtagtattaacatgtcaacaattttaattggtatatatatttctgaaaaaaaagcagtatgatggtaaaagaaatgtaaaaaagcctttgtaaaacccagtgcttacagtccaccaggatagcacctgtgaagcaaatttcctttgctgaagatacaccgccttttagaataatagcaagatagtttgaatttgtcttcttctctcacagcaatctaaaaattaacttaatcccatttatatgacatatctagaaatattcctgtacatgtggacattcccatcgcacacctcccatccaggctgtcctaaagtggcatctcctcttcttctgctcatgttctccccctctcctcacctctcctgctgacacgtggctcctccctgccttcctctccagtagccccagcagatcaggcccaaccagtgaacaagctcctggacttcttggatttctgaggacttgccctgccagggtgtctttctcaatcacaatctctccttcccgggagtccaattctcctagatcctgttatttatctaatgttatacatctgtatctacttggtggacttccctacatcttcacccgaaccccaggaatcttcaggtcatgcccatatgaccttagttctcctggagtcccttcttccttcttcccctgtgatcccaccaagtggagatctcttctcagaccctggagtgcagcagggacttctctggtctctgccccagggattaagggggtggaattgaggactcctgtgcccttcctatgcctgtgttttcatcagggtcagctgcacaaggtagggattcccactctcagagtatgaagaggggcagggagagatttggggaagctctgcttcagctgtgggcacaggaggcagcactcaggacaatctccagcatggcctggtcttctctcctcctcactctcctcgctcactgcacaggtgactggatgcagatcgaggggagggtccctgggaagcctatggattcttgctttctcctcttgtctctagaagcagaatcatgatgcctgtgtctctcccacttccagggtcctgggcccagtctgtgctgacgcagccgccctcagtgtctggggccccagggcagagggtcaccatctcctgcactgggagcagctccaacattggggcgggttatgttgtacattggtaccagcagcttccaggaacagcccccaaactcctcatctatggtaacagcaatcggccctcaggggtccctgaccaattctctggctccaagtctggcacctcagcctccctggccatcactggactccagtctgaggatgaggctgattattactgcaaagcatgggataacagcctgaatgctcacacagtgctccaggcccagggggaggtgagagaagaacccccttcctcctctaccaggagggtgagcgctcagctgctactgctcaggcgtggcctgtggcttctgctgctgcagcttcccccatggtccaggggcatccagggccctgcctcagagtagaggcttctctttttttctgttctgagaatcatgcacagcagctccttcctaggaacagggcctccagggaccagaacatccatctctttgtaccttgggacacagggtctctgcagtgaagtcctgggctgaggtgtcaggtccaactgtcatcacaaacctgatgcagaacctgtgtctccatcaacctcatttcctgatttctggaagttccgactgttggctttctgtccctgctcctcagggtgaatcgcttggcttctttcctccccagcctactctttttaataaaaccctttccaaggaggaataatgtccatacgagaaaacacctatatttataatataccatgacacccattttggcatgtttctggatccttgaaagcatcaccaccaccgagctatgcaagctgtgaccaaccccagcagctcctcatgaccctttgtcatctccctttctaccccaatgccctcccgggaagccacagatcctcctctgtcattagtgtttggtttccattttctggaaggtatcagtgttcacaaacattctcttgccatttgttgaggcttctttcactccgcacactttttgagattctccctgttgttgctgaatgacatctcatcccataaagggctcatcagtacctttgagggcccctagccattttgcctttcatgcccattcctgcatttgtatatacacatatagaatccagggtagcctatattccttttaatctgaattttaaaaaatcaatacattttctggggcccctaacagcgtcgagtcctgtaggcatttgatcttctctctccagtgatgctcagccctacttgcatctcatgcgattatactcacttctcgccattattcaacaattttgttttattctcttggttttaaataggcaatacacaaacaagatgccacatgagaactatggaaaccacttccccctcctacatcctgtctcctggcctgttggtttctctcagctgaagtgaccaggaatgcttacatttatgttccctcccagccaggatctgtgtgtagaaacaagggggtctgtctgtgtctgtgtgggcaaccacattatgttttctttagtaccactacaaccttactattgacaaacaactttttaattcctgagactgtgacttcatgtaatcctgacagtagcccgattattgcttttgaggcagtggtcctgattggagaggaactgtttgtgacctggggatggcgttctctaatttatcaaatgtaaacactggaggtcagttaaatttgaattcggtaaaacaatgatgaagaatcaataggtaggctgggcgccgtggctcacaccttaaccctggcacttttggaagccaaggttgatggattgcttcaggccaggagttcgagacaagtctgacccacgtggtgaaaccccgtatctcctaaaaatacaaaaattagctgggcctcatgacatatacctgtaatcccagtgactcaggaggttgaggcatgagaatcacttgaacccaagaggcagaggttgcagtgagctgagaccgggccactaactccaggtggagtaacagagtgacactctgactcaaaaaaaaataccaaaaaaaaaaaaaaagagtcagtatgtgtatcccccagacaatattgtgtatttaaatataaacataactgggtgccctttaatttatctggcaactccacacagtgtcacaacctggaagaagcatagctggggcagtcatccccttactgatgctgggtctaggggcttaactacaaagacagagctttgctagcaaagatacactcaagtgagcacatcagtgagcatgaaatgcatgtgatataattcccaatgaatgatgcctcctcacttctctaattattctttctattatccttcaagtctgcagattcagggcctccccagggattgcttcagcctgagcgctagacaagtgatctcatgtcctgtcacacccagatgcatggggctactctgtccccacacagaggggcttcagcctggggtgcataagtaacatgtgagagagagaagagctcagcctggctctgcttatatctagtgagagaccaacttcgggttcatttgatgctggaggctggtgagctgagagcagaggagagaccaagccttagagtgcagggctttcaggagagaaattgggaacctggaaatgggccacactcttcagtgaggaagaagcaggcagctctaggcacagccctgcattcctagtggcttccccttcatcaagcttgactccctgctttgatgtctgtcagggaatctacttcagcaaggtgaagatcccagggctttactaaaaatagcagtagaccaggcaggtatgtcatggttcaagagttctgtgcacagaaataaatacagatgcatattcacaagggccctcacagttgtctcttttggagtggaagagatgaagaaaggcagggagaaattgaaagactcagtcggtctgggcctggggcagcactggatgctgtggacttatccctgaagggtctgcaggtgaccacagccaggaagccagcccctgctatgaccctgtgtcatctgctcactgctcactgagctcagcagctgtgtcctcacaggaaactgggtgcagccagcttggccttctccaccccacctggaaaatgtgggcaggtgactgtcagcattgagatcctatgaaggggctgggagacaagggaagagggctgatttgcatgaagcaatcattccacacccttatctttaaactatatcccattaatggaagctctggggccatccaaacctgatcaatctaagaggggttatcagctggaggtggtcagagtgaggaagaaactggcttccttgaaagactcatcaacacagccaccaactctgggacaaatggggtgactccctataactgtcacccgatattagccacaggagcctgagcctagtcccctcaccttattgcttctgattctggtccagtcccctgttgtccctggacccttgcctatgtctgagtccagggtggcaggggtagccccatctcagtcaacatctatagagaggtaagagctactacggcttcaagcagagtccacagttttacccatgagggcctcttttgctcccccaccctgtcacacaggtgactactgctgtgggtctggtggagtggcccctggcccctgaaggacacaaggtattccttcctctctaacaccaggcatatagtggagaaggtatgggtgggtatagaacagattggcttttctagatgcaaatcggtaagaccctggctacagaaaaattatttcacaaaaccccacaccctttcgtgacaaaaacactcagtgaattatgaatagaaggaaattacctcaacatagtaaaccctatgtatgaaactcccacagctaacatcacgtgcaatctgaaagactgaagatatttcctgtaacttcaggaacaaagcaaggatgcgcactttcaccacttctattccaaatagtattggaagacctagccagagcaattagccaagaaaaagaaataaacagaaaagaaattagaaatgaaaaagtaaaataatctctgttttcagatgacctaatcttatatgtagaaaatccataaaacttccaccaaaatagcaaactcttctcagctaagggaccatgttctaacccaatgaagggaagctaagaaccttgataaaaggttacaggaacagctaaatggaataatcagtttagagagaaacataaataacctgatggagctgaaaaacacagcagaagaacttcatgaagcatacacaagtatcaatagctgaaccaaaccagtggaagaaagtatatcagagactgaagatcaacttactgaaatgggtgtgaagacaagataaggcaaaaaagcaggaaaagaaatgaacaaagcctccaagaaatatgggactatgtgaaacgaccaaacttacaattgattggtgtacctgaaagtgacggggagaatggaaccacgttggaaaacacacttcaggatattatccaggagaaattccccaacctggcaagacaggccaacattcaaattcaggaaatacaaggaagatcactaagatactcctcgagaagagcaagccaaagacacataaccgtcagattcaccaaggttgaaatgaaggaaacaatgttaagtggatccagagagaaaggtcaggttacctacaaagggaagcccatcagactaacagcagatctctctgcggaaaccctacaagccagaagagagtgggagccaatattcaacttcttaaagaaaagaattttcagtccagaattttatatccagccaaactaagctacataagtgaaggagaaataaaattctttacagataagcaaatgctgaggtattttatcaccaccaggcctaccttacaagagctcctgaaggaagcactaaatatggaaaggaaaaactgctaccagccactgcaaaaacacaccaaaatataaagaccaatgatgctatgaagaaactgcatcaagtaatgtgcaaaataaccagttagcatcatgatgacaggataaaattcccacataataatattaattttaaatgtaaatgggccaaatgccccaattaaaagacacagactggcaaattgggtaaagagtcaagacccattggtgtggtatattcaggagacccatctcacatcaaaagacacacataggctcaaaataaaggaatggaggaatatttaccaagcaaatggaaagaaaaaaaaaagctggggtcgcaatcctagtctctgataaaacagactttaaacaaacaaggatcaaaaaagacaaagaaaggcattacataatggtaaagggatcaatgcaacaagaagaactaactatgctaaatatatatgcacccaatacaggagcacccagtttcataaaacaagttcttagagacctacaaagagacttaaactcccagatgataatactgggagactttgacactccactgtcaatattaaatcaatgagacagaaaatgaacaaggatatcccatccttagaaaaccccatcgtctcagccccaaaactccttaagctgatgagcaacttcagtaaagtctcaggatacaaaatcaatgtgaaaaattcacaagtatttctatgcatcagcaatagacaagcagaaagccaaatcatgagtgaactcccattcccaattgctacgaagaaaataaaatacctaggaatacaacttacaagggatgtgaaggacctcttcaaggagaactacaaaccattgctcaaggaaataagagagaacatgaactcagctctggaccaagtggacctatagatatctacagaaaactttaccccaaatcaatagaatatacattcttctcagtgccacataacatatattctaaaattgaccacataattggaagtaaaacatccttagcaaatgcgaaagaatggaaatcataacaaacagtctttcagactaccgagcaatcaaattagaactcaggatgaagaaacttactcaaaaccacacaactacacggaaattgaacaacctgctcctgaatgactactgggtaaataatgaaattaaggcagaaataaagaagttatttgaagccaatgagaacaaagagacaatgtaccagaatctctgggacacagctagaacagtgtgtagagggaaatttatagcactaaatgccacagcagaaagtgggaaagatctaaaattgacaccctaacatcacaattaaaggaagtttagaagcaagagcaaataaattcaaaagctagcagaagacaagaaataactaagatcggagcagagctgaaagagatagagacgtgaataacccttcaaaaaaatcaatgaatccaggagctggttttttgaaaagattaacaatctagatagaccactagctagactaataaataagaaagaagaatcaaatagatacaataaaaaagataaaggggatatcactactgatctcccagaaatgcgaactaccatcagagaatactacaaacacctctatgcaaataaactagaaaatctagaagaaaggatagattcctggacacatacaccctcccaagactaaatcaggaagaagctgaatccctgaatagaccaataacaagttctggtattgtggcagtaattaatagcctaccaaccaaaaaaagcccaggaccagacagattcacagctgaattataccagaggtacaaagaggagctgataccattccttctgaaaccattccaaagaatagaaaaagagagactcctctctaactcattttgtgaagctagcatcatcctgatatcaaaatctggcagagacacaacaaaaacagaaaattccgggccaatatctttgatgaacattgatgcgaaaatcctcaataaaatactggcaaactgaatccagcagcacatcaaaaaacttacccaccacaatcaagtcggcttcatcgctgggatgcaagtctggttcaacatacacaaatcaataaatgtaatccatcgcataaacagaactaaagacaaaaaccacatgattatctcaatagatgcagaaaagccctttgataaaattcaacatcccttcatgctaaaacctctcaataaactaagtgttgatggaacatatctcaaaataataagaggaatttatgaaaaacccatagccaacatcatactgaatgggcaaaagctggaagcattcactttgaaaaccaccacaagacaaggatgccctctctgaacacttctgttcaacatagcattggaagttctagccagggcaatcaggcaagagaaataaagcgtatttgaataggaagagaggaagtcaaattgtctctgtttgcagacgatatgactgtatagttagaaaacccaatcatctcagcccaaaaactccttaagctgataagcaactccagcaaagtcccaggatacaaaatcaatgtgcaaaaatcgcaagcattcctacacaccagaaatagacaagcagagagccaaatcatgagtgaaccctcattcacaattgctacaaagaaaataaaatgcctaggagtacaacttacagggacttgaaggacctcttcaaggagaactatacactactgctgaaggaaataagaaaggacacaaaggaatgaaaaaacattccattctcatggataggaagaatcaatatcgtgaaaatggccatattgcccaaagtaatctatagattcaatgctattcccatgaagacaccactgactttttctgcagaatagaaaaaagctactttaaatttcatatggaaccaagaaagaacctggataaccaagacaattctaaacaaaaagaacaaagctggaggcatcacaccacctgacttcaaattacactaccaggcaacagtaaccaaaacagcatggtactggtaccaaagcagataaatagatcaatggtacagagcagagacctgagaaataacaccacacatctacaaccatctgatctttgacaaacttgacaaaaacaagcaatggggaaaggattccctatttgataagtggtgctgggaaaactggtagccatagacagaaaacagaaactggaccgcttccttacaccgtatacaaaaattaactcaaaacggattaaagacttaaatgtaaaacccaaaaccataaaaaccctggaagaaaacctaggcaattccattcaggacacaggtgtgggcaaatactttatgatgaaaataccaaaagcgatggcaacaaaagctaaattgaaaatgggatctaatcaaactaaagaacttcggcagagtaaaagaaacaatcatcagagtaaacaggcaacctacagaatgggagaaaatttttgcaagctacccatttgacaaaggtctaatatttagaatctacaaggaacttaaacaaatttacaagaaataaacaaacaaccccatcaaaaaatggactaaggatatgaacaaacacttctcaaaagaagacatgtatgtggccaacaaacatatgaaaaacagcgcatcatcactggtcattagagaaatgcaaatcaaaaccacagtgaggtaccatctcacaccagttagaatggcaattattaaacagtcgggaaacaacagatgttggtgaggctgcggagaaattggaatgcttttacactgtcagtgggaatgtaaattagttcaaccattgtggaagacagtgtggcaattcctcaaggatctagaaccagaaataccatttgagaccagtaatcccattcctgggtatatacccaaaggattataaatcattctaccataaagacacatggacacatatgtttattgcagcactctatgcagtagcaacgacttggaaccaatccaaatggccatcaatgacagactgaatatagaaaatgtggcatatatacactgtggaatactatgcagccataaaaaagaatgagttcatgttctttgcagggacatagatgaagctggaagccatcattctcagcaaagtaacactgaaacagaaaatcaaacactgcatgttcatactcataagtgggagttgaagaatgagaacacgtggacacagggagggaaacatcgtataccagggcctgtccgggggggctgggggtcaaggggagggagagcattaggatgaatacctcatgcataccgggattaaaacctagatgacaggttgataggtgtagtaaaccaccatgtcacatatatacctctgtaacaaacctgcgggttctgcacacatgtatcccagaacttaaagtaaaataaacaaacaaataaataaataaataaataaataaataaaataagtcccaccaaaacaaaaactgttagaactattaaatacatttggtaatatttcagaatacaaaatcaacacataaaaccatctaatggacagccatgatggctcatacctgtaatcccagctcttggggaagctgaggtgaaaggattggttaggatcaagagagttcaataccagcgtgggaaatgaagtgagaccctgtctcaaaaacaaacaaacaaacgaacaagcaaacaaacagggttcttatatttctatacttaatcaaccaaacaggaaacaagaagacaggacacaacgcaaaatgaaattaagaaaacaattcaatttacaatagcatcagaaagaataaaatacttaagaatcaagaaggggactcttctatactgaaaactataaaacattgctaaaagaaattaaagaatacacaaataaatggaaagaaacattgctaaaagaaattaaagaatacacaaataaatggaaagaaaacatttgttcatgaattgaaaaacttgatattgttaagaaatcaatacaaaccaaaagaaatctacagattcatttcaatctctattaaaattccaataatttttttgcaaaagtagaaaaaattaattctaaaatttacatagactatcacaggactccaaatagccaaaatgatcttctaaaagaagaacagtgttggagatttcacacttcctgatttcaaaacatactacagagctacaccaatcaaagcagagtggtacagatagacagacacagagacaaatagaatagaattgagcacccagaaagaatctcttagttatatgatcaaatgattttaaataagggtagcaagaccattgagtggggaaaggacagactccataaaaaatgtttttgagaaaactggatatccacatgcaatgtggaaatggataaaagacccaaatggaaaagccataactgtaaaaatcttaatagaaaacactaggaagaagtttaacaacattgggtttggaaatgatttcttgtatttgacgccaaaagcacaagaaaaaaaaaagaaaaagaatatagataaattggatttcatcaaattgtaaaatttatgtgcaacaaaggactctatcaacagagggaaaatgcaaatcatggagtcagaaaatattttgcaaacattgtatctggtaaggtgtccaggatatagaaagaactcctacaactcaacaggaataaaaaaatagaaacaatctgaataaaacatgggcccaagacttgaatagatatttctccgaagaagatcaataaatggccaataagcacatgaaaagatgtttagcatcactaatcattagagaaatccaaatcaaaccacaataatacacaacttcacacccagtaggatggcgttaccaaaataatagaaaataacaagttctggcaaagatgagtagaaattgtggagaaactataaaatgatgcatccactgtggaagccttatggcagttcctcaaaaaattaaacatagaattaccattttaacagaattttcacttctgggtatgtgcctaaaagaattcagagcagggtctcaaagagaaatttgtacacccttgttcatagcagcattgttcacaatagctaaaaggtagaggcagcccaagtgtccatctaatggataaatgggatatagtatacacacacaagggaatagtattcagccttaaagagagtgttctggcccatgctgtggcacagataaacctgaaagacatcatgccagcagaaataagctggcttcaaaagaacaaaaattgtttcattacccttatatgaggtacctagagtagtaaaagctaccgtgacaagaagtataatgaagtttcccaggtccttggggtggagagtagggggagaatggacagttatttgttttttgtttagtttagttttgctttgttttgtttttgagactgagtctccctctgtcacccagtctggagtgcagtggcacaatcttggctcactgcaacctctgcctcctgggttcaagcgattctcatgcctcagcctcccaagtagctgggattacaggcatgcaccaccatgttcagctaacttttggtattttttagtagagatggggttttaccattttgctcaggctaatcttgaactcctgggctccagtgatccaccgaccttggcctctcaaagtgctgaaatcaaggaagtgagccaccacaccgagccgggcagttcttgtttaatggttgcgaagttttagtttgggaagatgaaaaatttctgaagatgaatggtagcagtgtgattgtacaagttgatttacttagtgacactgaagtgtacacatgaaatggtgaaggtaacaaattttatgtttgaatattttaccacagtcaaaaagaggaagatttatatttggcaccattgctctacttccaagaacagtagaaagatacagtagtaggagagtgtgcacaagtatccaggacgtctttcattttttgccagccctgcagcatcctaacaatccaagagagcaggaggtgtctcattacaggggactcagaataatgtgaagaaatctggggcggggtgggggcataatgatagcacacaggtgccggacccagtccaggagtggccacaaatgcaagggctgcagaagagggggagatgaagctggtggcagtggtagcagctgcttcagctggaaaggggcatctgttgctttccaaagtggttcacagttgaaatatctggcatagatacttcatcctgcctacctttcatgactaactatattttcattgcaatatatgcagtcatagtgagaatacctatttcctccagatacaagcaaacgtgaaggaaatgtgctttagtgctttggccaacttgacatggcagtcacaaaaagaggatgaatatccaaagacaaccttttccaaagataaggttattataccgtttattgtaaatactggaagtgcacaacaatcattcagacacctgggaaaatgacttgaccaaatacagttgtgaaaacaatgagtaaagaaagtgatatattcttggtaaaagaaccactggatctagtgagtaaagaaccaaaaggagatgaccctagattggaacttttagaccaggaccttggtaacattggtcctgtttatgcaacaaaaacaaagcaataccttgtctaccagtgagaatctgaatgagggaacagcaacaggaagcagcagaaaaaaggaaaagaagctcagtgcaaacagctgaatggggagatcacagggaccaccaagaaggcccagggttttctgctcagtgccttccctctcatacaccttagagcacccactgaacaaagataactaccagtatattctagctgagcctgatccccacgcccttggtcctcagaagcttgaacttgactgctgggcaaaattccttattcctggagacctctacagaggctgcttgtatgaacaggttttgttagcctgacataattgagctccccagttaaaagtctccaatgacctgctggctgactgtggttgaacagaaggtctactctatggtacgggattctcatgggttaccttgatatcaccatggatgagatgccaccagacactgctgccagactgggttggtcccagtctttagataactgtcaagcttccttagtttatgataagtttaactattcttgggagaattaaagggaatgaagttccaccagtccactggcaaacactactcttctagctatagacaaggagacatcctgggattttatatgaatcttcctgaagaaacaaagacagtcaagtcattgcctgatacttacaaagataaggccttgataaagtttaagaattatttgtgttttgaggaaaaagactttgtgactgaagcagagaagagcctaaaagagacttcccacagtgagataagattttataaaaatggtgttagtcaaggcatggcttacaaagatattttcaaggggctttactttccagcaatcttaccagaaaacaactgcataatttccatgaacattggactgtgcttcaagtatcctccaaaggatctcacttactgccctatgagtgacatgggctgggatgctctggtagagcacactctggctggtgtcttggtgctagaaatggattcaatcactggacaagaaagtccttcaggggcaaacataaggacactgagggtcatcttattctacctgccttctctccttacttgtatcctaggccagcctatgctagcgcaactgtccacagatctctctctctctttctgtctctctctcgtgtgtgtgtatgtgtgtgtgtgtgtgcatgtgtgtatcaaatgatcaaacatcttcattcaaaagtccaagccctgcagcatcatgagacagtgctaccacacatgaagaaaatgttcaaagggcaccaaatagagatcgcatgatccaaagttatttctgatcccagaaaagaatggcacacaatcaatatgaatagtattagatatcaaaattatagtacaatctcatttgtttttaccatagattcaaactctctttagcatattggaaagcagaatccatgttctactgatgcaattccccttgaccatcatgaaagaattggactgaaagcaggacatttctgaagtctctggaggatacgtaacatgactgttggagggaatgcacataggaagaggtagtgaattatgtgtcaagtgccccaacaaaaggctgtcagtgtttgtctctgacacattgttggggagaaaggtggagtcacaggacacactgccatgggacccacgagacttgatcctacatcccacagcgggcagcctgcatcaacgtggtcatgcagggatagaaacacagccacagaaagctttcacctgcccaagcagcatctcccaagagccagcatgggtgctgtctctgctctgcttcttcctggactgtgtctcagagccctgagttctccctcacccagtttcccaatccccctcttctccactggttaccaggggttaggggagtggggaggggaaataaacgtttaaagggtacaaacttttcacttgggatgatgagaaagttatggaaattcataatggtgatgactgtatcacttttttttcagaggtggtaacttgctctgttgcccaggctggagtgcagtggtacaatgatagctcactgcatccttgaactcttgggtctaggcaagcctcctgcctcagactcctgagtagctgggactacaggtgcaagccaccatgccaggcaattctatcacattgtgaatatacttaacaccactgaattttacagttaaaagtgatttaaatggcaaattttatgttgtgtgtattctatgacaattaaaaatacacttgttcaaatgtcaaaatatatatgatgttatattcataaaattttccttttcacacttatatatttatcctattctaactcattctcatcaattaaaaaagtactgtaattactggtcattatgtactaaattttccataattcacattgaagccttaacccccaatattactgtatttggagacagagcattacagagggtaattaagatgaaatgagatcataaggaccggcatccttataagaggagattagaaaatggacaacataaaatgagatgaggacagagtgagaaggtggtcatctacaagtgtggacacatcttcagtttgtgtggagtaacagttgaagggctcgcccatcctataatgaaagttggaacaggtgccttgggcgggctccaggattaactgatctagtcactgcatcccactgtgggaccccagagggaaagaagcactgtggagattcctgagacattagaaatggagcctgagaaatttccaggacacccacatgggctccaggtgaagcaggggcccagaaggccttgtctgagccctgagtgtgacgcagcacctggccactagggggaggcaaactctgtgaatcctaagggacctgagctcttgctctgagccctgcccttgttaatcaccagccctgggagggagccgatttgcatggaatgtgatgtccctgcccacttcttcactgagggaataagaggctttagggcctcaggctcagctgagagactgaagaacccagcattgcagcagctccaccatggcctgggctcctctgctcctcaccctcctcagtctcctcacaggtcagggtgggcagtgggctgggcccccaaagggacccccacctcccagcctccatctccccatccctgctcttcctcctccaacagctcatcagccacccaccaacaggagccctcatgggtgtctgtgtttccagggtccctctcccagcctgtgctgactcagccaccttctgcatcagcctccctgggagcctcggtcacactcacctgcaccctgagcagcggctacagtaattataaagtggactggtaccagcagagaccagggaagggcccccggtttgtgatgcgagtgggcactggtgggattgtgggatccaagggggatggcatccctgatcgcttctcagtcttgggctcaggcctgaatcggtacctgaccatcaagaacatccaggaagaagatgagagtgactaccactgtggggcagaccatggcagtgggagcaacttcgtgtaacccacagtgacacaggcagaggggaagtgagacaaaaacctcccggctgatctgctctgtccacacttccttcccactggcctgactcacatttcagagggctgtctcttaactctgtatttaaagttttcaccttcccagacattttggagttctaattcacagcatatgttccctgtgtgtaaatattttctcaagagcttttgaaacattgaagtttgcacaccaacatttgtggtttttgccactcacctgtcccctgatgggattgaagtttccaggttgtggaactgctcacaggtgcgtttatcaggaaatcaccgtcaccagctcccacgacctttgtccatattcaacatttgtgagctgcctattcaatgatgggaactgacaatttccctggagacacaaggccttcaccctgactcacagtgtcacataatcgacgtggacttcagccatctccagtcacctccatgtgcacagagctctcatggtacatgtgcttggctgccctagaaagagagaatggacacacaccaaagatagtagaatgtgagcctgctctatatctgagattctgaaagaggcccccactgccttcacagaatgaattccttcacatgcagggagagagctctggtggaatcactctgcaatgctttctgatgacaaatacctggattgaggtcaaatttcacaggttaataacccttttcaagactacctccactacagactccagttcccaggcattaagcctgaggacccttgtagacaaccaacatggggctgtgaccagcaggagcaatgggtaactgtcccaggccctgccttggggctgctcacagccgggtgagccccactggccacaggctggcagaggctgagctgctccctgtgctcgctgatgaaactcagcagcctagtgctctcagggtccagcaaagcctcttgggcagggtcctgtgcctgttcccaacagccgctccttcgaggaccctcctaggcccacactcgagcagctccttcctcaacctcctctgtcctcacatccccttttgggttcctgaatcagtgatcaggtagggtctcatttagccagaagggagggagtagatttgcatgaacagcttcttcttttccctgagggcagaaggaaaaatagtcaagcctggggaagcccagcccaactgtgaggtccagaggctgtgtccaccatggcttgttgcctgaactcctctggtacccaatccttggtctatgtttatagactcaatgaaaatacctccctttctactggcctcttaatgctaacagaatcattttgtcccctaagcacaaatagcctttcgggttgctgggtgggatgacaactagagcagaagtctagcatgtgcaaccccattcctggcccatacatgtccctgctcttggcccagtctttgctggttactccctgaactctgaaacttcagggaagttgagtttctctttctcttgagattgtactcttgaggagctcctgaatttccaggtatagggtgacccctcctcattaaggacatggctctcagacttatccctggtttacttccccaggtttaggtctgtgagttctaaacagtttccctatgtttctttggttgatattttggttgatatttccctttgtttctttaggttgatattacattgggtaattacattggttgattacattgggtaaatatattcttgtagatatacacattataaactcttcccccattaagctcttaataaataaacttgtttgggtgccaatgtaccaatgtaggtaagaagtcttgacgcttttttttttttcttctgcaggagcagaggagaacctgaaaaaaaaaagagagagagacaagttcagcttataatactgttattttcatataaactctcctactttaaaaagtacaaaactagacctatactgaaaatatttttaaatatatcagagtatctgcatctgtcactgtggagatggttgcttgctctaccacagagcacaataatactgagcctcatcttcagcctaggcccctgtgatggtgagggcagtcttgtcttcaagcacagagtgtgagaatcaagtggggaccccatgcagagatggggacgtcagacacacacaccctggctcagcctcacctcatgctcctaacatctccatcttcttcacacagaggctgctgctgcttctggctaacacgggctcctgacgctggttctccagggcccaagagaaagtggtcacatatattcttctaagctgcaaaatttgtatttttaacccaacatgttattataacaatgtgttcataaagcacaatactaagatctatcatcaattgcacagttatgagttatttataggagtggcaaaataaaaagttacgcacacacacacgcagattcgggcaggccagaatttaattacaggagcaaagtttgatattagtgacacaacataacaatgatcctatgtataatgataaacatagcaatggaccatatgaagctttgaagaaacatagtggaaacacagaaaaaatctccctctcaccaaattttagaaaattctaaaaaaaattaaaaatttttaaaacccctcaaaactgagttaatttataaaatatgatacaaaacataaagtttacataactttaacactcttcatactcagtaaatgcaggttctttctccacaatttaatccagtgtaccaaaaccgagccttcctgtttgctggaggaaaacctcagcaccacaacagtagaaaagcaccaacctctctgcccacagtgcatcttccctccagagactccgcaggactctgcatggtctcctgagggccctgaagtggaggttctgtgatgagaagggggcatggatggcacagggcaagaatgtctgcagggtaagagtgttagaaggacaagcttcattcctctctgaaacaagcctatcttacatgatttatctttattcttctctacaaaaaaaaaaaagtcacaaagatagctgcaaagaaatatgtgaaattatacaaggctaagataacaaagaatattggaagaaaaagtaattatgacatcttctatcgaaacattttaggccaagcgtggtggctcatgcctgtaatcccagcatgttgagaggccaaagcaagagaatcacttgaggtcaagagttcaagacaagcctgagatcccatttttattttttaaaagcagcattaaaaaaaaaaggttcatcatagtctcctcttcccacagttaataatgagaatggagaaagttcaaaaagtgaaaatttaagcaactcttatgtacccataacaattttttaaattttgaaaaagaaatgaaacccgtagcacaactgaccaccagcacacaggtgcctcttcttcagctgcccctcctgaagtgacaaccaaacccaggggctcagcacaatgagctctccctctggccatacattccctgtgaggccccatctactctcatcccaacacaattgctccccaggcatctggggactgctgctgagattctccactcatggggtcctgggcacagcggtgttatcccagtccccctcttcctctgtgtcctgggagctggaatcagagtcagcctgatctggcccaaagcctacaattaagagccctgagtggcctctcctgctttccccccacattggactcttcctttcagtgtccttcctggggtactgtgtcactactcaataatatcttatgtcctcagtgctaggcgtttttcacataatatactcttgttagtttctcctcacctttccaagctcagttatcaactctaggctgatgatcctaactattcatttacagcacattgtcatataaaggccagcgatatctagaaaaaaaagtgccaataaatgtgtgtactgcatcttacgaatcactacaaggataccacaaacaatatccctgtatttaaatagagttcactcttcagacacaagagtttaagtggagttcaatataatagtttatatagataatagttaatataacagtttaaccagtctgtctgtggctaaaccagtcaccatctcctgcactggaagcagcaacaataagggtcttgggcttgtgtcctggtaccaacaatgaccaggaagtgccaccaaacctctgatacatatgtacggatccatatatttatatccatatcctgcggcgaatatccacctgcagggatccaggactgaatctcaggctaccggtctggcaaggaggcattgctgagcatctctgggctacaggcttaggacaaggctgatctctgctgttggctttaggcagctccatcgaggtccccacagtgctgcagtctggggaactgagacaaaggcacaccaggtttccaatgagtatgagctacctgcagcaccacccactgtcaggacaactgggctctttaccgtttgtgtgtatgtttcctggtgctgccactaaccagtgcccaggactcaagtcagggacagtgatctagagaatgcagctttgttctttcagagccagcccacagagggagcccttagcaatggcacattgtcagactgcttcaaaagaatcagaaagcctttgattccaggaacaggctgctctggggacagacccgagatgggtcaggggaggcagggacagattccaggtggctctctctcaggcacatgcactaatgcagaggtctaatcatccctattgtctactgaacaactactatgtgccaggctatggggagggctcaggatacagagttaccaagacagacaaggttcctgtcttcatagggctgacaccaaactaaagagagacagtcaagaagtcaatgggaataaggcatattgtggtgtatcaaagaggtgacactggccagaagggggagaatgatagaacgcctttagtgggtcgtaagcaaggaagacacagccttttgtttgagatttaggaggaaagtccagcttcttcaaggaagacaaaaaatgaggggatagtgcgaaggcaaaaggtccagttagaaagcagtggcattgtgcacatgagagatgaggtatctagcatctgatgtagcagctgagctgggaggaatgtgcatgacccacaccatggtgagaaggactagaggaaagaggtcactaggttgaggccctgaccttgtccttgtgatggaaacctgacaacagcctgcagctgcgatcaagcatgtcactctcctcttctctctggaaagctcataggactcaggactcattgctgcccttccctcttattcagtgagatttatttgaaccatcacttttcacacctggacagagacctgcttactttctcttgagcaaaagcactaagggtcgggacagagcactgtagagcacatgggatgatgccctacacactcaaggggctgctgttactgctgttaaagctcacgatcaaacctcccagagctctgtcagaaaccatgagacgggaggtgtcagtgctgaagtagctgatttgggggcacactgatttgcagtctgtgcagtcctgatttggaggtgtgggacagtgagggctgaagcccagcatcggcaagaggttcctgaggtgtctttatgtgccagggtccttgtgaccacctcagtgatgtgtgggggtaaaggtcaattgaaaagctggagagcagtggacaggcaggattctgtgtctgggtgagggacgggatgttcagctcctgcccaggcatccttatttacatttctgtttacctctcttcttccttgtctccttcccagggcagggttccagggctgttgtatctccgctgctctttctccatcacaaagagagcaagagagacaggttatgtgatgactaattccctcttcacactcagttgtctgattgtccttaggaattcttcctgaggatgggaatgtgctgttttatttctcccttacagtgagatcctagccatttgtgaggccaaggagattgaccccatcctgtcgatgaaggattatttataacacacatggtcaaaaagaacatcatcaacttctgcacaagtcagtccattcgtcagggttatagaagtgcacgtctctcagctgtcagcaatgggcttcaaatccccaggatgactaacttgtcaggatgggatcatccacattaagatgtttctttacagttagtgactctattcactgtgtttcccctgctgagatccaacctctatgagattgtttattggctgttttctgtcttgttattgctgaaaacacttcctggcactaaggacagactcaatacatgtttattaaatatgtgagttcacctacattggaatcccaggaagaggtacaaacctgaggtcaagataataatttttttaaaaattctgaatattttgtgtttgagattccaagttcattcaatggaagatactaagtaatgacttttgcctttggatttggttagcaggagaaggatatggatataaaaatgcaaatatatatatcacacatacctccccatggcccagagacctgaaagcccagctggtctctgcagctgccaattgcagcctctgttcactcatttatggtctgattgtcatggatccatatatactggatcccatgggttcatgtggagaaagtggagaggatgcgatgggctttcccagtcctgataaaagaaaccacaggaagcgaatagatcataaagcaaattctggggacagaaaaccctcgagagcaaataaactgctaatatgggtgagttgggaaaatgtctggcaatatttatataactaagaaactttacattagatatccttccttcacaatattcattacggagctttaaatcatccatatgatcaatgcaattcaaacattaaactcatcaaccccaagtcccatagcagactttgatgaggaaattcttgaaggaagaagggtgggtttgtgagctctgtgtccacagaagagatatttctccactaggagaactgggtaaagccaataaataattaggaatgtagatgcccaactggactatattctaatccaatatgcaatgctgtgagtcctgcatctgcaaattgttaacattcattgtgcttccttcagtttcccaattactacaataaattaactttagacatggatgattacagaacagatcaattaatgtgagagtccttggaatgtgttgctttaatccacaaaaattacggaacacttcaaatgtatatatttgttaatttatgtaccaattgtattttactgcttcgttgatctgttgtaaaaatcacccagtgagggagtaagctgatgggtaaaatgggttgaaaaattaaacaagatgaaccacattgatgatggtcaaatttggctgatgggtgcaaacaattcattagaaaagtatctgtatatttgtatggttcaaaagtttccatgctatccagtgtttaaaatatccttgtttgtaactgttctgcttttaaccggtgtacaatgtggacaaaatgtaagcttacactctgactttgagtagaagcccatcttctcccaacaggcagaggagaagctggtgtggagaacatggaaaacacaggagctcagggtttcccaggacagagaagcgagtgagcctggagccctaaaagcaagggtggggctgtgagttgggctgtgggtgtgtgcaggggccacagtgtgaagggcatgcttcagaggccacaggatttggattttataataagaatgatgagttactgaaggggtttaagccaggtagtaccttccctgcctcatctatatgagagggatctgtatccaaatgcctggaggagagcgtgcctgagaaaagtgagtgatcctgattctagattattcactaaagcacctcgtgagtctagaaacccaagggccatttgcacagttagcacaagagtagacgtggcaacattgagaagtgatggtctctgcctttgtctcctctggcattcaatacttgcaaaaacactttgcaggtaaaataaatactgatatttcaaataacctgaaagcatccagtaaaaaaataaaggtggcaatatcaagatacaaacaaattgtataacatttaggacaaatcgtttaccaaaaaatatgacacgactgtgaagaaagtgacgttttacttagggagataatggctaacctcttaaaacagagatatatgtcacactgtgacaggaaagtctacaaaatctcttaatgttcctacatcacaaaattgagtcaaatctctataaaacatatgaaaccattagatgtataacttttgctaaattgctgtctttaacatgtattggatcatttatttttcctggaaaattctcattcttcactgtccttttgaacaaccccagctgcccttcaacccagctcctcagctgacccatttttcatgatgcccaccctgatggcacatgtgggcaactcgatttttctagaatgccatgcaggggtgctgacaactttaaaagttatatagtacatggctgcacatcccacagaccaagactacttctgggagtgagaaatcacagtaataatgcatagcatgatagaagcagtgtctgggaatcagaccatggatatgtgaatacagacagtgactggagagctgcagagaccagctgggttctgaagtctctgagctttgggaaagtgtgtttcctgggaccagcgtcggatgttgtggggctgccctgtggttctgacacagctgctcagtaaggagcattcactccaagaaatccaggccttgaggctgggccctgtgctcactgatggagacttggcagctgtgtcccctctggcctggcagagttccctgagcagggacctgtgtatggtctcaacaggtgcttcctcccagggccttgcaaaaagaaaagcaaaccttcctcctgctcagtctgcagagagagcagagctgcatccccaggtctcaaggaggggcccggcaatccctgggtggaaacacatttgcatgagcagcccctcctctgcaagggtgggaagaaaaggaggcctggggcagcccagtcccactgtggggtaagcggctgtgtccaccatggcctggaatcctctcctcctcctgttcctctctcactgcacaggtaggaaaaggcctcagagaccagggtcagccacacagcctgattctgactcttgtgtcaaagatcactaaaaaaaatattaccttggtttctgtcttaaagcctatatatgcctgtgttccaggttccctctcgcagcctgtgctgactcagccaacttccctctcagcatctcctggagcatcagccagactcacctgcaccttgcgcagtggcatcaatcttggtagctacaggatattctggtaccagcagaagccagagagccctccccggtatctcctgagctactactcagactcaagtaagcatcagggctctggagtccccagccgcttctctggatccaaagatgcttcgagcaatgcagggattttagtcatctctgggctccagtctgaggatgaggctgactattactgtatgatttggcacagcagtgcttcttacagtgacacacacagatggggaagtgggacaaaaacttcaccctgatctgggtcttgttctgtaacagtttttaaattttaaaataaccagccaagggacaaactaaatttggaaataactttctagttgtaaaaggctcttctctcaatttcccatccattcttctgaagtctcagtaaaacaaaaccaaaccaaagcacctgatgaccctgaagtgttggctggttgtccatatgtgctaacaccactgcctgcggagctggacttttgttcttgaaagaagcaaaatgaggctttcctagctcacatcatagtcagagcctggggacatcctagcaggtgaacagtcccctacagcatggactctgctcttccagcgtacaagcagagacctccccttccatccccactagtctgttctcagggctgtctgaggctcactgtgtcccaggaacaaggcactcaaatatgaaatgctgcctgaggacacaggtcagggaattccagatatagtgctgacctggctcagtcctgggtacctgcatttcagtggaaatgtcaggagatgggattacgtctgagggtaactgtggacctgaggccggtaaacctctatgtaggacatgagagagtcaaggggaggctccaccatggctgaggcaaggctgaggctgctccttggccatgggggaagtaggtcccagggatgtgactttcctgcagctcattccactcaggaccacggggactgctgagggtgggtttgctgatccctcagggcctgtgttctcttctcctctattgcaccattggaggttctcactgagtcaggttctagtagtgagtctgtggaacatctgggtacagatactgtttgcttcaagtgactcctccccaggaaactcttgagaaggcccccatctcaatgtcacctttttctgcatggggagcagcagaaacattgggcattccctcccagaaagagcccctaattttgtgacttaggacatcagcgattgtccctcaggggtccaagcctgattctcctgctctgggtttattcccacagcctcctggacaacttctgcgctccagcctgaggactggctggttatcagtgtcacacagctgcatcctgactccatgttaccaagggttcctattccatggggaaatgagagaaagatctgccccactcatcctctctgccccatccctcctttatccttgcctgtgaccaacaccagttcatgccaagacttttactgtcacttgtgttactgaaagcagagcaagggtgcagggatgataactccttttcttactggtctccccaatggaaacagaatcaacttgtttctagaagcaaaaggagctgcccacacatggtgggtgtggatgaggtggggatgacaagaaagaatccagccagtgtgacccagaagtccaggagccttcagcctggtcccacaggtgtcctctccttttggtgcaggtgtgctgatcatttcctgagctctgaatctgtgggaaagatgacaagaaaggagaatccagcctgtgtgacccaagacccatatgtgagagcggaagtctgacacttaagaaaacgtgggctcagcattctgagaggtctggatctggctcggcctagagctgctctagaagagaagcaagagaaatgctcagccttaggtggcccaggcacagtggtcctgtcaaaggtctgagctctctgcaacatggatatcctgcagagacatccttgggaggctgtgatcctagaatgatgtaaaaatgctaatggaagtgagcaggggatggtttatggaggaatgaggagatgggtgtggggtcagatgtggtaaggagggtgcaccctgaagaggagactgtccattgtgactcataggagaaggatgcccggggcctagggcagtgacaaaaagaggacctggaaggaccggcaccctgaagacacgtagagactggggtttggtttgtctgtgagggttcctgaggagaatcacataaaaaatccacagtcagtgtcttctgtccagggctcactgtcgcaactgttgccccttccttccagatcctctgggtgtccaggttccttagccgtggatctgctcctctctctgccctcagcctaagagctgatggggcatccaccaggaagcgcatccgtgggcagggaggaggccgtgggcagccttctcctgtatgtgagacactgctcagcctcggtgaccccctgttcattaaggtgggaggaaaggaaaacaaaattcactgtgaacatctatgcatcatcaaagaaaaagcaatgagaagaaacaggaagtgaagcccagctctaatagtttatttctacttggaaataaataaaacaatatgcctgatgtgttatataaacacaataaactttttataaaaactatgaaaattatgtaaaggagcatggcttacactaaaaggaacatttaaaataatgacacccttgaaatgcaatcccaaaacacagcatccattttatttcagttacatatacggactggttttatttaaatgcctgcaataaatctcactattttgttgtttaaatggagcatttaaaatctcattgtggccaggcgcggtggctcacgcctgtaatcccagcactttgggagtctgaggtgggctgatcacaaggtcaggagttggagaccagcctggccaacatggtgaaacccagtctctactaaaaaaatacaaaaattagccgggcatggtggcgcgtgctggtaattccagctacttggaaggctgaggcaggagaattgcttgaacctgggagatggaggttgcatttagctgagatggtgccactgcactccagcctgggcaacagaccaagactccggctcaaaataaataaataaataaacaaacaaataaataaaaaatctcattgtattgcaactgtctgatgatacattcacaagtataaatatcaacataaccatccagctgtttccctccatccacgtaaaattccccaaacaaatatttgttaagagtccagggtgtatcatgccagaactcatgcaatcataaacacaatctatttcatttttcattttgattaacagaattatcttttttcttaagattattgtttttagtttattagattctagatgtcattacagaccaaagatgaataattttcatcatcttcaagccacccccacaagactcactactgaatttgaaccataatttttccctggaaatcctagttggggtgctcgatgctaagagctatcacatatcaggctcacctgaggacagactctggtcgtcaaaccaagttaaaattttaattcttcccatgttcaaagactgaacatctttgctctttttgctcataagtgaaacactccaaagacatttgccaggatcccccacagactggcattcagtgcttggaggacagactcctaggcaagatccttggtcacagtatccggatgactatgactgcaaatctggggaagtagagggagaacaaagatttaccaggaaaaccctctgggaattcctccccagggcatcccagaggtaagagctccctttctcctcagcgcagcaggatccacagaggaagtggagccctggccaccagggaggagtcacatgagaggagaggacccggtgtccaacactggtggggaagtgagtccatggggccggtccccgctctgggcttgatcctgaaataaaaggactttgtgtagacatcacctgagtcctctacaatgtacagccaaagagccatagacagattcactcctgaggagtccagtagagcgtgaagactgccctgaggtcacaggagggagacacaggtgccaccttactgggccgggacttgggagcgggggcagtggccagaaaacagggcggggcggaggcagcggtgaatctcagaggctctggtcacctgatcacagaacggtttgccttagtctggacactagggggcgcttggggaccatttctgagaagacttggggtaatcagagcagaaccaggcacctgccctgcctgatgtcctctgctcagggctggcagctgtgtcctgtgtcctccccaccccctgggaccacaaagctccacccctgccacaccctgacatactcaagcccaggagcctgacccagggctcagggtggggtcaaaaaccggggggatctgatttgcatggatggactctccccctctcagagtatgaagagagggagagatctgggggaagctcagcttcagctgtggtagagaagacaggattcaggacaatctccagcatggccggcttccctctcctcctcaccctcctcactcactgtgcaggtgacaggatggggaccaagagaggggccctgggaagcccatggggccctgctttctcctcttgtctcctttcgtctcttgtcaatcaccatgtctgtgtctctctcacttccagggtcctgggcccagtctgtgctgactcagccaccctcagcgtctgggacccccgggcagagggtcaccatctcttgttctggaagcagctccaacatcggaagtaattatgtatactggtaccagcagctcccaggaacggcccccaaactcctcatctatagtaataatcagcggccctcaggggtccctgaccgattctctggctccaagtctggcacctcagcctccctggccatcagtgggctccggtccgaggatgaggctgattattactgtgcagcatgggatgacagcctgagtggtcccacagtgctccaggcccagggggaactgagacaagaacccccttcctcctctgtcaggagggtgagccccggcagctgctgctcaggcccggcctgtggcttctgctgctgtagcttcccccatgggtccaagggcatccagggccctgcctgagagtggaggctcctcctccccttcatcctcagagtcatgaacaggctgtccaggaaacagaacatcctgcttcctgcaacttgggacacagggtctctgcactgaagtcctggactgaggtggcaggtacagctgtgtcgtcacagacccacctctgatgggaaacctgtgtctctgtcatcctccttttcccatttccaggagtttccagagtggtgtcttcctccccctgctcctcagtgtgaatccctgtgcttcctttctctccagccaattctttttttaataaaactcctttcatgtaggaataatgcatatttaataaaccacccagatttataataggaaattagacaaatgttgacattttttgatccttgaatacatcaccaccaacacgcagctatgcaacctgtgaccaaccccagcaacccctcatgaccccttgtcatctccctccctcccttccccagtgctatcctgtgcagccacagatctgtctctgtcactattgtttgctttccattttttggaatgtatcagtgttatcagacattatcttcccatttgttctggcttttttcacactgcaaactccttttgggattcttcctgttctcgctgaattgcacccatcccatagagggctcattactacctttgagggcctttaggttgattattcctgattttgtttatttattttaaagtttgaatttatcgtccatcaaaatcaaactcttggagttatgttcatctaaggtgacaggagagtctgtgatgtcttgtcgggattcttgcttcttcatctcttgcctctcgttctgtctatattggaagaggttctcatattctatttatttacttatttatttatttgggtttttaaggatttcagtgtttttttctctttaattattaatttttttattttaataggtttttagggaatcggtggtatttggttacataaataagttctttagttgtgatttctaagatattggtgcactcatcacccaagtagcgtacagtgtacccagtgagtagtcttttatccctcaccccgcttctaccatttcctcccagtcctcaaagtccattgtatcattgttatgcctttgtgttctcatagcttatctcccacttatgggtgagaatatgccatgctttgttttcaattcctgagttactgcacttagaataacagtccccaattctatccaggttgctgggaatgccattattttgttcctttttatggctgcatagtattccatggtatgcatatatttaacatttcctttatccatttgttggtttatgggcatttgggctggttccatgttcttgcaattgcaaattgtgctgctataaacatgcgtgtgcaactatcttttttgaataatgatttctttttctctgggtacatgcctagtcccagattttgggactttgctggatcaaagggtacatctatttttagttccttaaggaatctgttttccatagtggttgtactagtttaccttcccaccaccagtgtaaaagtgttttgttttcaccacatccatgccaacatctattattggccattcttgcggtattaaggtggtattgtattgtagttttgattggtatttccctgatcattagtgatgctgttcatttttctttatgtctgttggccattcatatatcttcttttgagaatttttatttatgcctttagcctactttttgatgagattgtttagtttttttcttgataatttgtttgaattctttgtagatgctagcccttagtcattaggtggatatgtagattgtgaagattttcttccactcggtgggctgtctgttaactctgctgattatttcttttgctgtgaagaagctttttagtttaattaggtcccatctatttatctttgttcttgttgcatttgcttttgggttcttggtcatgaagtctttgcctaaaccaatgtctagaagggtttttctgatgttatcttctagaatttttattgtttcaggccttaggtttaagtctttgattcatcttgagttgatttttgtataagctgagagatgaggatccaggtttatttctttcacatttggcttgccaattatcccagcaccatttcttgaacagggtgtcctagagtatagtttgaagttaggtaacctgatgcctctggatatgctttttgttgttgttgttgtttgtttgttttttcttagtcttgctttggctatgcaggctcttttttggttccatatgaattttaggattgttttttctagttctgtgataaatgatgttggtattttgatgggaattgcattgaatttgtagattgcttttggtagtatgatcattttcacaatattgattctacccattcatgagcatgggatgtgtttttatttgtttgtgtcatctatgatttctttcagcagtgttttgtagttttctttgtagagttctttaatctccttggttaggtatattcctaagtatttttttttttgcagctatttgttaaaggggttgagttcttgatttgatattcagcttggtccctgttgttgtatttgtgtgccttaattttgtatcccgaaactttgctgaattcattcaccagttctcggagctttttgaatgagtctttaaagttttctaggtatacgatcttattataagcaaacaatgacagtttgacttcctctttaccaatttggatgcccttaatttctttctcttgtctgattgctctggctaagacttccagaactatgttgaacagaagtggtgaaagtgggcattcttgtcttgttccggttctcggaagaaatgcttttaagttttttctgttcagtataatgttggctgtgggtttgtaatagagggctttcattaccataaggtatgtctcttctatgccagttttgcagagggttttaatcatgaagtgatgatggattttatcaagtactttttctgcatcgattgagataatctgtgatttttgttcttaattctgtttatgtggtatattacatttattgactttgtatgttaaaccatccctgcatccttggtaagaaacccacttcatcatggtggactatgatttgatagctgttggattgggttagcaagtatttagtttaggatttttgcatctatgttcatcagggatattggtctgtagttttcttgttttgttatgtccttcccctcattttggttttagggtgacactggcttcatagaataatttattccctctttctccatcctgtgggttaatgtattagtattctccagagggaaagaactaatggaatatatatatatatatatatatatatatatatatatatatatatgagtttattaagtattaactcacataatcacaagtcacacaataggccatctgcagggtgaggagcaaggagagccagtccatgttccaaaactgaagagcttggagtccaatgttcaagggcaggaaggatccagcactggagaatgatgtagggtgggagactaagccaatctctctttcacatttttctgtctgcttatattctagccatgctggcatctgattagattgtgcacgcccaggttaagggcgggtctgcctatcccagcccacttactcaaatgttagtctctttggcaaaaccctcacagacacactgaggatcaatactttgtatccttcaatccaataaagttgacactcaatattaaccatcgcaattactgtcatagacttggtgccaattcttctttcaatgtctgatagaattcaaatgtgaatctgtctggtcctggacttttttcgggggttgactttttaaaattattatttcaatctcactgcttgttattggtctgttcagagtttctacatcttcctggtttaatctaggagggttgtatatattcagatatttatcaatcttctctaggtttttcagattatgtgcatattatcttttatatagtttttttgttttaattttatttagttctggtctaatctttgttatttcttttcttctgctgagtttgggtttgcattgttcttgatcctccagtttcatgaggtgtgaccttagaaggtctgtttgtgctctttcaggctttttgatgtatgtatttaatgctaaacttttcccttagcactgcctttgctgtatcctggaggttttgataggttgtatcaagatttagaactactgcaaccttactattgaccaacaggtttttaattcctaagagtgtgacctcactgaatcctgacaacagctttatgattgcttttcatgcagtaggccctggttagagaggggagtgcttgtggcctggaggtaggattctgcaatttatcaaataaaaacactggaggtcagttaaatttgaattcagtaaaacaatgacaaagaattagtatgtgttagtatctcccacacaatatttttcagttgaaatacaacttatctgggtgccctgtcgtttatctgccaactcctcacaggattcaaggcttggaagagggagtgttggggctggcctcgtcttactgatgccagttctatgagatgaacctcaaaggcagagcttctctaacacagctaccctcaagaaagcacgtcagttagcactaaatacatggtataagttcctcaatcaatagtgcctactcacttccctaattcttctttgtattattcttcaagtctgcagactcaggacctctgctggggttgctgcagccagagttctggatgagggacctcataagcctttcaaaaccagacgcagggggactactcagtccccacgcagcggggcttaagccaggggtaaataagtaagaaatggaagagctcagcatggctctccctttgtccagtgagacagcaaactccagggtccttttgatgctgaaggtgcgtgggctgagagtagggggagacccaccctgagagcccagaacttccaggacaggacttgtcagtctgaaaaggggccacactcttgagtggggaagaaggaggcatctctcgccacaggcctgcatttctggtggcttccccttcaccaaactgtgctctctgctctgatgtctatcagagaatctccttcagtgagactaagatcccaggactttactaaaaataacagcatgaaccagatagatttgtaatggtaccagaattctctgcagagcaatgagtacaaatgcagcttaacaaaggccctcacactcataactgaaaggctcagtaggtctgggtctggggcagtactgggtgctgtaggcttgtccttgaggcatctacaagtaagaacaactgggaagccatcctgctgtgaccctgtatcatctgctcactgctcactgggctcagcagctgtgtcctcacagggaaccaggttcagccaacctggccttctccaccccacctagaacatgtattccggtgactgtctggactgaggttctatgaagggactggcagacaagaagagggggctgatttgcatgaagaaaccattgcacaccctttcctttcatctaaaacccattaatggatactctggggccacccacagaagtctagcttgtctcctaaatttgagagttaggaaggagtcatttcttatcaatctacaggtagaggggccatcagcagcagagggccagagtgagggagaaactggcttcgagagactcatcaacacagccaccaactcttggacaaatggggcacttgctataacagtcaccccaagctactcacaggagcctgagcctagtcccctcaccttattgcttttgattctggtccatgcctctgttttccctggactctttgcccatgtctgagtccagggaggcaggggttgctccatctcagtcaaaatctatgtatatgtaacagctactatggcttggagcagagtccactgttgtacctatgagggcctatcctgctccaccatccccttacacaggtgacaactgctatgtttctgatggactgacccttttcccctggaagacacaaggtatttattcctttctaacacaaggcatatagtggagggggtaggggtgggtgtgaagcagagtggcttttccagatataatgcagtaaggccctggttacagaagatcatttcacaaaattccacaccctttcatgataaaaacactcaacaaactatgaatagaaggaaacttcctcaacatagtaaaggccatctatgaaaatcctacaactaacatcgcatgcaatctgaaagaccaaagatatgtttttgtaatatctatcaggatcaaagcaacaatgcacattttcaccacttctattaagacagtattggaagacctagccagagtaattaggcaagagaaagaaataaacagaataaaaattagaaataaaaagtaaaattatctctgttttcatttgatttaatgtcatatgtagaatacccttaaaagtcccacaaaagaaaactttgtcagaatgattaaatgtattcggtaatatttctgaatacaaaaatcaccatgtaaaattatctcatggctgggcatggtgactcatgcatataatcctaacactttgagaggctgaggtgggaggactgcttgtggtcaagagttcaagaacagcctgggcaacaaagcaaggccctgtctctacaaaaagagagagagagagatgaaagaagaaaggaaagaaagaaagacagaaagaaaggaggaaggaaaagaaagaaagaaagaaagaaagaaaagaaagaaggaaggaaggaagaaagaaagaaagaaagaaagaaagaaagaaagaaagaaagaaagaaagaaagaaagaaagaaaatctcttacatttcaatacttgagcaaataggaaacaacccaaaacaaaatcgggacccacacccattaggatggctttacccaaataatggaaaataataagttgtagcaaagatgtatagaaattataactgtaatgcattgctggagggactataaaatgatgcatccactgaggtggccttgatgacagttgctcagaaaactaaacatagaattaccattttatcagaattttcacttctgggcatgtgcctcaaagaattgaaagcaggatctcaaaattgtccacccttgttcgtagcagcatcattcacaatagctaaaaggtggaggcagcccaagtgtcatctaatggataaacggaatatagtatacacacacaagggaatagtattcaaccttaaaaagaaagttctgacccatgcgatggcatggatgaaccctaaagacatcatgccaacagaaataagctggtttcaaaaggacaaatgttgtctgtttgctcttatatgaggtacctagagtagtgaaatccatagagacaagaagtagaatgatgttttccaggcatgaaattttggtttgggaggatgaaaaattcctggagacgaatggtggtacgtgactgtacaacaatattactttacttaatgacactgaagcgtgtggttgaaaatggttaaaatatgtgttttgtgtttgaataatttaccactgtcaaaaacaaaaagatttatatttggtgcagttacaagaaccataaaaatatacaggactaggagagtgtgcctgagtagccaggacacccttccttctgtgccagccccacagcatcctaacagaccaatagagttggaggtacctcattacaggtgacacaaaataacatgagaaagtctgagaatggccatgatggtaggggtgggtgcctgacccagtccaggagcagcctctagtgcaactatggccaaagaaggggagatgaagctggtggcaatggtagcagcctctccagctggagagggacatctgctgtcctatgaaaatggctcatagttgatatatctggcaaagacatgtcatcctgtctacctttcatgaccaactacagttttcatagtgctttggttaagctggcatggcagtcccaaacacaggatgaatgctatagcatttattgataaatactgggagtgcatgatgaccattcagacacctgggaaaatgactaggctggataacatcgttaaaacaatgagtaaagagagagatttattcttggtaaaggacctcctggatccagggagtaaagacctgaaagaagattgcccaagatttggacttttggatcaggactttggtaaaactgatcctgtttatgacaagcaaaagcaaagcagtgccctgtctgtgagtgggaatctgaatggggcaactgaacaggaagcagcagaaaagaggaagaggagttcagtgcaaacagcaagatgagatctcagagaccaccaagaaggcccagagtgaccctttgttttctgctcagcgccttgccccttacaccttttaaaacacccatttaacaaggatggctactggtatattccaaccgagcctgagccacacacccttggtcctcagaaggttgaagactgctaggcaggagaaattattcctgaagacctctacggagcctgtttctgtgaacaggttttgttagtctaacatgattaagctctccaggtaaagatctccaatgaccagctggctgactgtggttggaaagaagggttactctatgatgcaggcctctcatggggtatggaaagggacctgggactttgaaatcatcaaggatgagttgtcaccagacaccactgccaatggggttggtctcagtcctaaggtaaccatcaatctcccttaggttatgataaacttagctattcttggcagagcaaaagggaaccaagttccacctgtccactggcaaataatactcttctagctacggatgaggacaggtcttgggattttatattaatcttcctgaaaacacagagacagccaagttattgcctgatacttacaaagataaggctttgataaaatacaagaattatttgtattttgaggaaaaagacattttggataaagcacagaagagcctaaaacagattctgcacaggcaaataatattttataaaaatggtgtcaattaatatgttgaataaaaggtatttttgagggggttgatttccagccatctcacaggaaaacaactgcatggtttgcattaactttggactgtgctgcgagtgtcctccaaaggatctcgcttactcccttatgagtgacatgggctgggatgctgtggtagagcacactctggctgatgtcttgtatctcctggagacagaagtggatggaggcacagtcctccatgggaaccctgaacaggtccctctttcttttcaaatatggactttctggggaatgatactggacggcttctgtagttgttgttgttttttgaactgtctcaaatgttttcccaaagatgctacagaacatagcctatccatttagcaagtgaaaaggctgaataagactgggagagactccctgctcatcatcattcttcttccacttccagtgactgctcatattctgtgccataagccaacagctactgatcccaagatcttgtaatccctctgtaaaactggtgctgtactgcataccttgccagctgggactttttatcttactgcattttccaggaataaataaccttgtcccaaaaacaaacatatttaaagacatttccttctgtggacactgattccatgctatctgttttccaaggaagtggtgagcccgtttctgagaacacctggtatcaatggctgtcccttccaaaccaagcaaaaagtgatttcttgtcggtgtggatttggttttgttattaattttaaaacatacctttgaagacttagatctctgaaactactagatctctagaagtgtaattgtgaaaaaagtttgcttgcatcatcaacaacatgaaaaactctttctaaataaaatttgttttgaagttaaaaaaaagaataatgcaagattggaaactgggaggtctgaagattcccaagagcactctcaattctgaagctaattttcagctcagggaccccaaacagcccttcacttcttatgagtccctagaaggactcacatgactcactgaaaactgtgacattcattaatgtgatttttctacagtgaaataatacagattaaaataattcaaggaaagagacacatgggcagagttcaggagaattccaagcacaagcatccatttgtcctctcccagtggagtaatagacaacgctgcattctgccggcaacaatgtgtgattctatgtaggaagcattgccaaccagcaaagctcacccaggcttggtgtccagaaaaattttgattggtggggtgggtgagagtggggttgttatgtagaccttgatgaccatcctcatggctcacttgagtttccactgaattgacaataaaacttcaatcttcaacctttggtcattttcttttaaaaaattttctaaagaaaattattttaaaaagtctcatataaacgagctgtttatccaatatgaggctcaacgcaaatagtttcaaaaagtcagtaggtcattaaaacaattatttagtcattcaaactaaatatttagtcattcaaacgttgttatctggtgttcagatagcaacgaacaccatgtagcactaaaatcgcattatagtcacaggggcaggatttcagcaacagcaagagaaagtaatacaaacaggaatgagcaaagaatagacaagtaatgggtatgaattggcctgggaaatattgtggcaatgtccaaagacaaatcaatagttatttgttaaagaagtgaaagacaacacattctcagtccaggaaagccaccagggggtggtctgggtctcttggattgtaagaagctcaagaggttcaaacttaatgaaccctgcacagatgctcactgactcatggaaatgttagagcagctgcttcctcccacaggacaaatccacagcacacagccaccctgggctggccccccacagtgtagctgctctcagggctgtggacccaggtggtgataaaggcagtaaagatttgcataaagcagcacacagcacaccccctccgtgcggagagctcaataggagataaagagccatcagaatccagccccagctctggcaccaggggtcccttccaatatcagcaccatggcctggactcctctctttctgttcctcctcacttgctgcccaggttaagagagatttcaaataccagcctttggagggatccctttttctccctttctaattcctaatatatgtctgttttttttgtttcagggtccaattcccaggctgtggtgactcaggagccctcactgactgtgtccccaggagggacagtcactctcacctgtggctccagcactggagctgtcaccagtggtcattatccctactggttccagcagaagcctggccaagcccccaggacactgatttatgatacaagcaacaaacactcctggacacctgcccggttctcaggctccctccttgggggcaaagctgccctgacccttttgggtgcgcagcctgaggatgaggctgagtattactgcttgctctcctatagtggtgctcggcacagtgacagacccatgagaggaaccaagacataaacctccctcggcccttgtgatgtggagatcacatgatcagacatgccagatcccaagatagcctacatgtggaccagccatagaaaggggaaggaaagggtttgaattgattcctatttctacttaagtcttgatgtgtaggaaatgtaagaatgatttgggagtaactggatcaaaaaaaaaaaaggaaaagttaattgttttctattctaaaaggaacactaacagcaggatcacatataaaggctgggtcaaaatgcatttcctccagaaagaagcatcttcagtgtataggctttctgagctaagagcaaagaaactttttttgcatattactgaagtttgttttattgagttactttcaaaccaatacctccagaaagaagcatcttcagtgtataggctttctgagctaagagcaaagagaagaaactctttttttgtatatgactaaaatttgctttattgatttactttcaaaccaatacatgcctattatataaaataaaaatattaaaaaccaccaagttcactgcaaagctgtctcatcagaaacaatccaatttcttcatttggatgcattctttcatttttgttctcaatatttccacaatgggggtcataccttgtgctttttctctctggttttacacatctttatgcctcctcccacaccctgtgcctctctcctgactctcagggtcctgggcagtcagggctcacttggtagcctgcacagtctgtctgtgacaaaaccagtcaccatctcctgcactggaatcagcagcaataaggttcttggaattgtgtcctggtaccaacaatgacaaggaagtgcctccaaacttctgatgtatagaagcaaatatctgcctgcagggacccaggatggatgctcgggctaccagtttggcaaggaggccttcccaagcatctctgggctccaggctgaggacaacgctgatctcaactgttggcttcagacagccccctggaggcccaaacagtgctgcagtctgggggagtgagacaggaacatgtcaggtctcctaggagcacgacctaactacagcaccatacaaccaggacagcagggctgtttaccatttgtgtgcatgtttgctggtgcttctgctaaccaggacccagggctcagattagggacagtgatctagagaatgctgctttgttttctcagggccagacttcagagagagcccttggccacagcattgtcagactgcctcagaagaatcagaaagtccttgatttctggaacaggctgccctgggaatacagccatgataggccagggcaagcagggacagaatccagctgggtctgtctcaggcatgtgcactaataaagatctctgtttgtccttattgtttactgaatacctactatgtgccaggctcaggtctcatgctaaggatacagaggtgagaagacagacagggattctgtcttcacaggactgacaccatgcagaaaagtgagggccaacaagtcaataggagtaaggcatattgtggtgtatccaagaggtgacactggccagaagggggagagcaataggaagcccttagggagttgtaagcaaggaagacacggagtctgatgggagacttaggagaaaagtccagcttctccaaagaagatgaaaaaggaggggagagagtgaaagtggagggtctaattaggagacggtagctttctccacatgagagatgaggtctccagcaagtgatgaagcagctgaggtggtgaaatatgcgtgacccacaccatggtgagtaagaccaaaggaaagaggtcactaggttgaggcccaaagcttgttcctgtgatataaacctgacaacatcctcttgccgttactgagtgtctcacacaccttttttctttggatatctcctgggactcaggactcattgctgcccttccctcgtattcagtgagattcatttcgaacatcacttttcacacccagagagagacctggctcctttgtatggagcaaaagcactgagggtcaggacagaacattctacagaacatgggatgatgccttacacactaaaggactgctgttaaagctcgtgatcaaacctccctggagctacatcagaaaccacgagaggggaggtgtcagcgcttaggtgcctgatttcagggcacactaatttgcagtttgtccagctccctcccaggcatttttatccacccctctctttacctcctttcatccttgcctccttctcagggcgggcctccaggcctgtggtgtctctgctgctctgtctccatcacaaacagagcagtagggagattatctgataatgaagttccctcctcatactcagttatctggttccccttaggaattcttctgcatcatgggaatgttctgttttatttctgccctacagtaggaacccagccatttgtgaggccaaggagattgacctctttccgttgaagcaggattatatttaacacatgtattcaaataacatcatcaacttatgaacaagtcaatccattcttcagaattatagaaatgcatgtctctcagctgtcagcaattggcctcagatccctagattggcgaacttgtcagggtggggtcagccacatgaagatgtttctttatagttagtgactctattcactgggtttcccctgttgagatccaacctccatgagactgtttatttttgttgttgttttctgtcttgtcattgcccaaaatgctgcctggcactaaggaaagacttaatacatgtttattaaatatgtgagttcacctacattggaatcccaaaaagaggtacagatctgaggtcaagttaataatttttaaaaaaattctggatattttgtgtttgagattccaagttcattcaatagaagatattaagtatgaagttttgcctttggatttggttagcaggagaaggatatggatatgaaaatacaaatggatcacacatacctccccatggcccagagtcttgagtgcctagctgctctctgcagctcctaatcacagcctctgttcactcatttatggtctgattcccatggatccatacatgctggatcccatgggcttatgtggagaaagtggagagaaggtgatggccctgctaaaaaaaccacaggaagcaagttgataatgaagcaaattctgggcacaaaatctctcaagagcaaataaactgcagaatatgggtgagttgggaaaatttctggcaatatttatataactaagaaggtttacattacatatacttcaacaaaatattaattctaaagcttccaataagtcatatgatcaatgcaattcaaacattaaactcatcagtcccaagtcccataatagactttgatggagaaattcttgaaggaagaatgatgggtttgtgagctctgtgtccacagaagagatatttctgcactaggaggactgggtaaagccattaaataattatgaatgtagtgcccatctggacttttttctaatccaatatgcaatgctgtgggctctgcctttgcaaatcgtagcattcattgtacttcctccagtctcccaattattacaataaattaattttaaacatgaatgattaaaagacaaatctattaatgttagagtccttggaatctgttgctttaatgcacaagaattatggaacacttcaaatgtatatatttgttaatttatgtaccaatgataaaatactgcttccttgatctgttctaaaaatcacctagaaagggagtaagttgatgggtaaaatgggttgaaaaattaaacaagatgaaccatattgatgatggtcaaagttggctgattggtgcaaacaattcatcagaaaattctctgtatatttgtatgactcaaacgtttccatgctaaccagtgaaaatatccttttttgcaatgagatgtttatgttctgcttttaccaggtgtacaatgtggacaaaatgtaagcttacactttgacttcaagtggaagcccatcttctcccaacaggcagaggagaagctggtgtggagaacatggaaaacacaggagctcagggtttcccaggacagagaagtgagtgagcctggagccctaaaagcaagggcaggggctgtgagttgggctgtgggggtgttctggggccacaatgtgaagggcatgttgctgaggtctcagggttcaggtttcataataacaacgaggagttactcaaggggcttaaaccagggagtgccctgcctgccctatctgagtgacagggatctctctgaatgccttgagaagagagtgtctgagaaaagtgagtgatcctgattctagattattcgctaaagcacctcgtgagtctagaaactcaggggccatttgcacagttagcacaagagtagatgtggctaaattgagaagtgatggtctctgcttttgtctcctgagacatccaactcatttgcaagagaattttgcaggtaaaatacatactgatctttctaataaactgaaaacacctagtaaaaaaatacacgtggtaatagcacaatgcaatttgtataacagctagaacaaattcttgaccaaaaaatatgatgcaactgtgcagaaaatgacgttttacttagggagataatggctaatttcataaaatagtgaaatatgtcacactgttcactggtaaaggtaagtctagcaaatctattagttttcctgtatcacaaaatcgaatcaaatctctttaaaacgtatgaaaccattgtaaatataacttgtgttgcattgctgtctttttttttttttttttttttttttagacagaatctcgctttgtcgcccaggctggggtgcagtggcccaatatcagctcactgcaagctccacctcccgggttcccgggttcacgccattctcctgcatcagcctcccgagtagctgggactacaggcgcctgccaccacgcccagctaatatgttgtatttttagtagagacggggtttcaccgcgttagccaggatggtcttgatctactgacctcgtgatccgcccgccttggcttcccaaaggaattgctgcctttaacatgtcattgatcctttatttttcctggaaatttttcattattcaccatctttttgaacaaccccagctgcccttcaacccagctcctcagctgaccccttttccatgatgcccactctgatgacatatgtgggcaaatagatttttctaaaatgccctgttggggtgctgacacctataaaagttatgtatgtacaggtctgcacatcccacagaccaagactacttctgggagtgagaaatcgtagtaataatgcatagcatgatagaagcagtgtctgggaatcagaccatggatatgtgaatacagacagtgactaaagagctgcagagaccagctgggttctgaagtctctgagctttgggaaagtgtgtttcctgggaccagcgtcagatgttgtggggctgccctgtggttccgacacagctgctcagtaatgagcattcactcagagaaatccaggccttgaggctgggccctgtgctcactgatggacactcggcagctgtgtcccctctggcctggcagagttccctgagcagggacctgtgtatggtctcaacaggtgcttcctcccagggccttgcaaaaagaaaagcaagccttcctcctgctcagtctgcagagagagctgagctgcatccccaggtctcaaggaggggcccggcagtccctgggcggaaacacatttgcatgagcaacccctcctctgcaacagtgggaagaaaaggaggcctggggcagcccagtcccactgcgggggtaagaggttgtgtccaccatggcctggactcctctcctcctcctgttcctctctcactgcacaggtaggaatagacttcagagaccagggtcagccacccagcctgattctgactcttctggcaaagatccctgaaaaactttaccctggtttctgccttagcacccattaatgtctgtgtttccaggttccctctcgcaggctgtgctgactcagccgtcttccctctctgcatctcctggagcatcagccagtctcacctgcaccttgcgcagtggcatcaatgttggtacctacaggatatactggtaccagcagaagccagggagtcctccccagtatctcctgaggtacaaatcagactcagataagcagcagggctctggagtccccagccgcttctctggatccaaagatgcttcggccaatgcagggattttactcatctctgggctccagtctgaggatgaggctgactattactgtatgatttggcacagcagcgcttctcacagtgacacacacagatggggaagtgggacaaaaacctcaccctgctctgggtcttgctctgtaccaatttttaaattttaaaataactggcctaggcacaaactatatttggaagtactttctagttgtaaaaggctcttctctcaattttctatccatttttctgaagtctcagtaaaacaaaacaaaacaaaacaaaaccacctgatgaccctgaagtgttggctggttgtccacatgtgctaacaccagtgcctgtggagctggacgtttttttcttgaaagaagcaaaatgaggctttcctagctcacatcatggtcagagcctggggacaacatagcaggtgaacagtgccctgcagcatggactctgctcttccagcgtacgggcagagacctccccttccatccccagtagtctgttctcagggctgtctgaggctcactgtgtcccaggaacaaggcactcaaatatgaaatgctgcctgaggactcaggtcagggaattctggatatagtgctgacctggctcagtcctgggtacctgcatttcagtggcaatgtcaggagatggcgttagatattagggtaactgcgggcccgatgccagtaaacctctatgtaggacatgacagaatcaaggggaggctccaccatggctgagacaagccagaggctgctccttggccatgggggaagtagatcccatggatgtgactcctgtagctcatcccactcaggaccacggggactgctgagggtgggtttcctgatccctcagggcctgactgtgttctcttctcctctcttacaccattggagcttctcactgactcaggtctagtggtgagtctgtggaatatctggatacagaaactgcccaatatttgcttcaagtgactcctccctgggaaactcttgaggaggcccccacctcaaggtcatctttttctccatggggagcagcagaaacattggccattcccatggaaatggctatgaggcctcccagagagaacccctaagtttatgacctaggacaatagtgatggtccctcaggggtcccagcctgcttctcctgatctgggtttatccacacagcctcctggagtgcctctgggctccagcctgaggacctggctggttatcagtgtcacacagctgcatcctgactccatgttaccaagggttcctgttccatgtggaaatgatagaaagatctccccactcatcctgtctccccatccctcctttatccctgcctgtgaccaacaccagttcatgccaagacttcagctgtcagttgtgttactgaaagcagagcaagggttcagggacgataactccttttcttactggtctccccagtggaaagagaatcagtttgtttcaagaagtaaaataagctgcccacacatggtgggtgaggatgaggtggaaatgacaagaaagaatccagcctggctgggcatggcagctcacacctgtaatcctagcagtttgggaggcggaggtgggtggatcacctgaggtcaggagtttgagaccagcgtgagcaacatggtgaaacatcgtctctactaaaaatacaaaaattagttgggcatggtggctggcgcctgtaatcccagctactcgagagactgaggcaggagaatcgcttgaaccagggaggtggaggttgcattgagctgagatcatgacactgcactccagcctgggcaacaggcagagactccatctcaaaaaaaaaaaaaaaaaaaaaaagaaagaaagaaagaaaagaaaaaaggaaaagaaagaatctaggcagtgtgacccagaagtccaggagccttcggcctggtcccacaggtgtcccctcctttttgaacaggtatgctggccatttgctgagctctgaaactgtgggagtgataacaagaaaggcgaatccagcctgtgtgacccacagatgtgagagaggtagtctgatgcttaagaaaaggtgggatcagccttctgaaaggtctggatctggcttggcctagagctggtgtagaagagaagcaagagagatgcttagccttgggtggcccaggcccagctgtcctgtcaaggggctgagctctctgcaacatggaaatcctgcagagccatccttgggaggctgtgatctcagtaggatgcaaaaatgctaatggaagtgagcaggggatggtttatgggggaatgaggggacggtgtggggtcaggtgtggtaaggagggtgcaccctgaagaggagagtgtccattgtgactcacaggaggaggaggcccggggcccagagcagtgacaaaaggaggacctggaaggacctgggccctcaagacacacagagactggggttttggtctgtccctgagggtccctcaggaggatcacataaaaaatccatagtcagtgtcctctgtccaaggctcactgtcccagctgttgtccctcccggatcctctgggtgtccacatcctgtagttttggacctgttcttctctctgccctcaacctaacagctgatggggcatccaccaggaagcgcatccgtgggcagggaggaggccgtgggcagccttgtcctgtatgtgagacactgctcagactcggtgaccccctgttcattaacgtgggaggaaaggaaaacaaaattcactgtgaacatctatacatcatcaaagaaaaagcaatgagaaaaaacaggaagtgaagcccagctctaatagtttatttctacttggaaataaataaaacttaatatgcctgatgtgttatgtaaatacaacaaacatattttaaaaactataaaaattatgtaaaggcacatggcttacactaaaagaaacatttaaaataacaacacccttgaaatgcaatcccaaaacacagcatacattttatttcagttccatgtatggactggttttatttaaatgtctgtattaggtttcactatttggttgtttaaatggagcatttaaaatcttattgtattacaacttatatcaacataatcatcttgctgtttttctgtatccccttaaaattccctaaacaaatatttattaagagcccagggtgtatcatgccagaactcaggcagtcacagacataacctgtttcatttttcattttgatcaacagaattatgttttctgttaagcttgttgtttttagttcattagattctagacgtcattacagatcaaagacgaaaaatttctatcatctttaagccacccccacaacactcactactgaatttgaaccaaaatcttctcctagaaatcctcgttggcggctcgatagtaagagctgccatgtatcaggctcacctgaggacagacgctggttaaaccaagttgaagttttaattcttcccatcttcaaagactgagcatctttgctctttttgctcataagtgaaacactccaaagtcatttgccaggatcccctgtagatgggcattcagtgtacagactcctaggcaagatccctggtcacagtatccaaatgactttgactgcaaacctggggaagtagagagagaacaaagatttaccagaaaaaccctctgggaatgtcttcccaaggcaccctagagggaagagctccctttctcttcagctccacaggatccacagaggaaggagagctctagccagcaggaaggagccacatgagaggagaggaccaggtgtcccacacaggtggggaagtgagtccatggggctggtccccgctctgggcttgatcctgacataagaggactctgtgtagacaccacctgagtcctctgcaatgtacagccacagagccatggacagattcactcctgaggagtccagtagagcgcgaagactgccttgaggtcacagcgggaagacacaggtgtcacttgagctggcctggacctgagagagggggcagtggacagaacagaggggaggcagtggtgtgaatgagaggctctggtcaccttatcatagaatggtttaccttggctggacaccaggggacgctgggggaccatttctgagaagacgcgcggggggcgggggtgggcggtgatgggagcacaaccggccacctgttgtgcctgttgtcctctgctcagggctcacaactgtgttctccccaccctctgggaccacagagctccacccctgccacaccctgacatcctcaaggcaaggagcctgacccagggctcagggtggggtcacaaagctgggggggtctgatttgcatggatggactctccccctctcagagtatgaagagagggagagatctgggggaagctcagcttcagctgtgggtagagaagacaggactcaggacaatctccagcatggccagcttccctctcctcctcaccctcctcactcactgtgcaggtgacaggatggggaccaagaaaggggccctgggaagcccatggggccctgctttctcctcttgtctccttttgtctcttgtcaatcaccatgtctgtgtctctctcacttccagggtcctgggcccagtctgtgctgactcagccaccctcagcgtctgggacccccgggcagagggtcaccatctcttgttctggaagcagctccaacatcggaagtaatactgtaaactggtaccagcagctcccaggaacggcccccaaactcctcatctatagtaataatcagcggccctcaggggtccctgaccgattctctggctccaagtctggcacctcagcctccctggccatcagtgggctccagtctgaggatgaggctgattattactgtgcagcatgggatgacagcctgaatggtcccacagtgctccaggccaatagggaactgagacaagaacccccttcctcctctgtcaggagggtgagccccagcagctgctgctcaggcctggcctgtggcttctgctgctgcagcttccttcatgggtccaggggcatccagggccctgcctgagagtggaggctcctcctccccttcagtcctcagagtcaggaacaggacatccaggaaacagaacatcctcctccctgcagcttaggacacagggtctctgcactgaagtcctgggctgaggtggcaggtccagttgtgtcatctcagacccacctctgatggggaacccgtgtctccgtcatcctccttttcccatttccaggagtttccagagtggtgtcttcctccccctgctcctcagtgtgaatccctgtgcttcctttctctccagcctattcttttttaataaaactcctttcatgtaggaactatgcacatctaataaactacccatatttataacaggaaattagacaaattttggcatttttctggttccttgaaaacatcaccatccccgggagctattgtgaccatcccggcagctcctcatgatgcttgtctcctccctccctcccctaatggcctctcaggaagccacagatctgcctctctcactactgtttggtttttttttctggaatgtatcagtgttatcaaacgttatcttcccatttgttcaggcttctttcactctgcacacttgctttgagattatccctgctgtcgctgaattgcacccatcccttagagggctcattactatctttaagggtccttaggccatttttttctgattttattcatgtatttcctttaaagtttgaatttattgttcatcaaacaaactctatgggtgatgttcatctaaggtgacaggacagtccgtgatggtttgtcaggattcttgcttcttcagttcttttcttggctctctctatagtggaagaggttctcatcttttatttatttatttatttattttggggtttttttaagggttttagcgattttccctttttaattatttttaaaatttgttattttattttaataggtttttggagaacaagtgttgcttggttacatatataagttcgttagtggtgattcctgagattgtggtgcactcatcatccaagcagtgtacactgtatccaatgagtagcctctcatccctcacctccctcctatgctttcccccgagtccccaaagtccattgtatcattgttatgcccttgggttctcatagcttatctcccacttatgagtgagaacatacagtgttttgttttccattcctgagttacaccagttagaatgatagtctccagttccatccaggttgctgtgaatgccattattttgtttatttttatggctgtgtagtattccctggtatgtgtatgtatacatcacatttgctttacctacttgttgatttatggacatttgagctggttccatgtttttgcaattacagattgtgctgctataaacatgcgtgtgcaagtatctttttttgtataatgacttctttttctctgggtagatacctagtcgtgagattgctggatcaaagggtacgtctatttttgtttccttaaggaatctccacactgttttccacagtgattgtactagtttaccttcccaccgccagtgtgaaagtgttttgttttcaccacatccatgccaacatctgttatttttttattatagctattcttgtgataggaaggtggtaacacagattgtggtaccgatttgcatttccctgattattagtgatgttgaacatttttctatatgtttgttggccatttgtacaagttcttttgaaaattgtttattcgtgtccttagtccaccttttgatggaagtgtttatttttttcttgataatttgagttcttcgtacattctagatattagtcatttgttggatgtatagattgtgaagattttcatccactttgttggttgtctgttaactctgctgattctttcttttgctgtgcagaagtttttttcgtttaattaagtcccatctatttatctttgttcttgttgcatttgcttttgtgttcttggtcatgaaatatttgcctaaaccaatgtctagcaaggttgttctgacgttatcttctagaattcttaccgtttcaggccttagatttaattatttgattcatcttgagttgatttttgtataaggtgagagatgaggatgcagtttcattcctctacatttggcttgccaattatcccagcaccatttgttgaatatggtgtcatttttctactttatgtttttgtttgctttgtcaagcatcagtgggttggaagtatttggtttcatttctggattctttattctgttcctttggtctgtgtgcccatttttatatcagtaccaagcagatttagtgactatggagtcaaactttactggagtttgaagctgggtaatgcgatgcctccagatttgttccttttgcttagtcttgctttgtctatgcaggctctttttggttccatatgaattttaggattattttttccaattctctaatgaatgatggtgatattttgatgggaattgcatagattttgtaacttgcttttggcagtatgatcattttcaatgtattgtttctacccattcatgagcatgggatgtgtttctatttgtttgtgtgtgtcatctatgatttctttcagcagtgttttgtagttttccttgtggaggtctttcacctccttggctaggtatatcctaagtatgtattttgcagctatttgcgaaaggggttgagttcttgatttgattttcagctcgtttgctgtcattgtataacagagctactgattcgtgtgccttaattttgtatcttgaaactttgctgaacttatttacagttctaggagctttttcgatgagtctttaaggttttctaggtatatgatcatattatcagcaaatagtgacagtttgaattcctctttgtcaatttggatatctttgatttgtttctcttgtctgattgctctggctaagccttccagtactatgttgaatagaagtggtgaaagtgggcattcttgccttgttccagatctcaggagaaacgttttccacttttttccgtttaatataatgttgactgtgtgtttgtaatagagggcttaatagaggacataagttatgtcttttctatgtcaattttgcaaagagttttaatcatgaagtgatgctggattttgtcaagtattttttctgcatgtattgagataatcatgtcatttttgtttttaatgctttttatgtggtatatcacatttattgactcacatatgttaaaccatctctgcattccctggtttgaaaaccacttgatcattgtggactatgtttttgatagctgttggatacatagaataatttaggaaggagtccccctttttccttcctgtggattaatgcattagtcagcgttctctagagggacacaaataatggaatatatatatatgtttattaagtattaactcacatgaacacaaggtccaacaataggctgtctgcaggctgaggagcaaggagagccagtccgagttccaaaactgaagaagttggagttccatatttgaaggcaggaagcatccagcatgggagaaagatgtaggctgggaggctatgcccatctctcttttcatatttttctacctgcttattttctagccatgctgtcagctgattagattgttcccacccagattaagggtgagtgtggctttcccacccactgacaaaaatgtgaatctcctttggcagcaccctcaacagacacacacaccaaggatcaatacttttttttttttttttttggagatggagtcttgctctgtcacccaagctggagtgcagtggcgcgatctctgctcactgcaagctccgcctccagggttcaagcaattctttgcctcagcctcccgagtagctgggactacaggtgcccaccaccatggccggctaatttttttgaatttttagtagagacggggtttcaccgtgttagccaggatggtctcgatctcctgacctcgtgatccgcctgcctcggcctcccaaagtgctgggattacaggcgtgagccactgcgcccggccaatactttttgtccttcaatccaatcaagttgacgctcagtattactcatcacaagtccactccttgtcagcatgaacccatatacaacttgtgatatcgtacataatcttcaaataaagacaataataaagtcataattacgcctaacataatacaattatccttcatacaaccagaacgcacgaatccctaacacaaatactattacatcaagttactgatacttaaatgctgatgtgacgtcaataaatcttatgttatatgacaaaggagaaaggaaataaaatgaagatattttcttagtacgagtttatagatgcgcaaacatgtttttaacaaaagaaggaggaaatactcttgacaattacactcctcgtttctgccgctggccatagctggtattgatgactaccttcttctactacccattctgtattccctttgccttcagcaagcacctcagtaggttgtgttttttttcctggtggagtgacccaaatcttcattcctgaagggtcccattgaccttaatcacagggcatggtaatagcaagaaatgccctaatgcatctcctgtattccatgcatgttcttcagtaactccattgtggagtagtaaactgatttcattttgatagtctgggtcaatcaccccagccgacactgtaactcccttcttagccattgacttaaaggtaggagaagcccaaaatgtccaggtggcaatcttaacttccagtttaatggaatcattgttgtgtctccaggtggtagtgttccttcctctggaagtaaatcctttgagccagcagaacataatgtctcaggaacaggaagcaaaacatttgctagtggatcactagggttgatggtgagtggtgccacttccacttccaccccttgattcctggatccatgaatcctggctacaggagggacagtaccatatattggatgctgatttaaagcatacacagccatctggagaactttgccctggccctgcaaagtattgtcacctagttggcaatgtaattgtgacttcaaaagccattccactgttctatcaatccagctgtttcaggatgatggggaacatggtaagaccagtgaattttgtgagcttgagcccactgctgcacttctttagtcataaagtgagagcctttgtcagagcattgttgtgtggaatatgatgacagtgaatgaggcattccaagagtacacggatggtagtctcataggcaaaccaatatctaggataagtgtctatttcagttaagacaaacctctgcccttcctgtgatggaagaggtctgttgtatttctcctcacacagggcaccagttgagatattgctcctcagaagacagcattagctgcgggggtctgcctgcagaccctgactcaaacgacggatgaataaaaacggacactgacacacagatattctgtttggccagtccggctgggttctttgattctgagtgtccgacaacatacacaccaggagaggtttgtcactgtggtgggtcctgagcagctggtactccaggcatttatttagtatacaattaacaacagaagctttgagtaaacacacttgtggataattaacatggttaagagagtagttctacgaatgattaaagctcaggtaccctggtctaaagtaaataccattacggggcaatatccctggttgacctcccaccgagagggccatctggctcaaaggttagttaatggagatagggtaaacaggcttaactgggaaagcctccattgtccctagcatttaccctatgacctaatgctctaaggtaagaaccagctgccttcagcctgtacaattattacaagctatgtaacattttagccttccaaaatgtttgtgattattccctataactttccctaatatttccctttgatatttctgccaccatcctgagtgaatcccaacagaggtccaatataatcaacctgccaccaggtagctggctgataaccccaaggaatggtgccacatcaagggctcagtgttggtctctgctgctggcaaattgggcactcagcagtggctgtagctaggtcagccttggtgagtggaagtccatgttgatgagcccgtgtgtaacctccattcctgccagcatggccacttccctcatgggcccattgggcgatgacaggggtgtctggggaaagaggatgcgtggtgttcacagaactggtcatactctcctcttgattattaaaatcctcctctgctgaggtcacccgttggtgagcgctcacatgggatacaaatactttcacagtttttgaccactcagagaggtccatccacatatcttttccccaaatttctttgtcatcaattttccaatcatacttcttcctagtccctgtgacagttactacaggacagaatgaagggggactaacacagaaatgaagacaaagacaaagggatctgttttaaagaaggggtcagggggctccttgcttctagtgagcaagggccctgagctactgcaatccttcatatttattaggtagaaagaacagggaggaggaggtaacagttggtcagctgcttgatttatcacaggttcacaggattgctttctttatacaacatacttcagatgtgctgcagataatcaaaagaaacactgtgcttggggcgtgacggctctcagcattcgttctggtggtagatgcagtttgtcgtttgccaacaacctgcattcatgagaacagcttgctgtttgctccagtggtatactgagttggtcacgaccctcattctttcggcctccaagaagtccctgatcgtccagccaaaccgttgactacagcaaataaattcatatataatcacacatctggagatttctccttccatgcaaagagcacaaccaggtgtgctcctcaaagttctgcccaatgggaagatttcccttcaccgctgtacttcagggatgtcctggaaaggggctgtagtgctgcagctgtccactttccggtggtgcctgcatatcatgcagatacatttgtgaaccaggccctagtcttctttctgtcagctgatcatagtgaactgcccctgagaccaccagtgcaggctgggggatagtgcaggctggtggcaggagtggaggtcatggacatttgagccacttccccatgtaacttacttgtgccttcagcccaaatacgtatataccacttccactgaatgatggaatgctgctgtgcatgatccactttatggctaaatgggttagaaagcacccacttcatgacaggcagttcaggttgcgtggggactttaagacgcatagtcaaatgttcagtttccaccaaagcccagtaataggccaagagctgtctctcaaaaagagagtagctacctgcagaagatggcagggccttgcaccaaaatcctagaggcctccactgtgattcacttacagtggcctgacaaagactccaagtagctttgctatctgccgctgacacccaaataccattgggtctgttgggtcatacggcccaagtggcagagcagcttgcacagcagcctggacctgttgcagagccttctcctgttctgaatcccactcaaacctggcagccttttgggttacttgataaatggactggagtaacacacccaaattagagatatgttgcctccaaaatccaaataggcccactagccattgtgcctttcttggttgtaggaggggctaaatgcagcaacttatccttcaccttagaaggaatgcctcgacaggccccacaccactggacacctagaaattttattgaggtagaatgcccttgaattttagttggatttaccgcccatcctcttgcatgcaaatgtctcaccagtaagtccactgtgtttgctacttcttgcccactggatgcaaccagcacaatgtcatcaatttaatgggtcagtgttatatcttgcaaaagagacaagcaatcaaaatttctttgaataagattatgacacacagctggagagctcatatacccctgaggtaggaccgtaaaagtatattgctggccttgcctgctgaacgcaaattgcttctggtgggccttatggaccggaatggagaaaaaggcattttccaagtcaatggctgcatatgaggtgccaggagatgcattaatttgctcaaacaaggaaaccacatctggtacagcagctgcgattggagtcaccacttggttaaacttccgataatccactgtaattctccaagatccatctatcttctgcacaggccaaatgggagagttgaaaggggatgttgtgagaatcaccacccctgcatttttcaagtccttgatggtatcactaatctctgcaatccctccacagatgcaatattgtgggtttatttttttttaataaagtttcactctgttgcccaggctaaactacgatggcagaatcatggctcactgaaacctccatctctggtttcaagcaattctcctgcctcagcctcccaagtagctgggattacaggtatgtaccatcacaccccacgaattttttgtatttagtgtagatgaggtttcaccatgttggtcaggctggtctcgaactcctgacctcaggtgaggtgatccacactaagatccagcttatgtggatcttttctcttcttttcttggttaatctcactagtggtatatataattttatttatcttgtctaagaattggtttttgtttcatttatcttttctatcatttttttgtttcaattttatttagttctggtctgatattgctatttcctctcttctgctgggtttgggtttgcattgttcttgattctccatttccatgaggtgtaaccttagattgtctgtttgtgctctttcagactttgtgatgtacgtatttaattctaaacattcctcatagcactgcttttgctgtatcccagaggttttgataggttttatcaagatttagtacaactgcaaccttactattggccaacggcttttgaattcctaagagtgtgacctcatttaatcctgacaacagctttatgattgcttttcattcagtaggtcgtgattagagagggagtgcttgtggcctggatggaaggttctccagtttatcaaataaaaacaccgaaggtcagttaaatttgaattcagtaaaacaatgacaaagaattagtatgtgtaactcccacacaatattgttcatttgagatacaaacttaccttgtagttcatctgccaactgcacacagggttcaaagcctggaagaggcagagttagagctggtcttctcttcctgatgccaggtctatgagctgaacctcaaagacagggcttctctaacacagctaccctcaagtaagcacatcggttagcactaaatacacagtatacgatgcccaatcaataatgcctactcacttttctaattcttctttctattattcttcaaatctgcagactcaagacctcccgaaacattgcggcagccaggattttgaatgagggtcctcatatgtctttccaaacaagatgcaagggtgctccttggtccctacacagaggggcttaagccaggagtgcataagtaacatgtaagagacagaagaactcaacctggctctccctctgtgcagtgaaacacctaattccagggttctttgattctgaaggtgggtgggctgagagaaagaggagccccaccctgagagctccgagtattcaggacaagacttggcagcctgaataggggctatactcttgagtgtggaagaagcaggcatctctgggcacaggctgcttttctggtggcttctccttcaccaaactgggctccctgctgtgatgtctatcagagaatctccttcagtaagaccaagattccaggatttaactaaaaatagcagcacagaccagaaaggtatgtcatggtacttgaattctgtgcagagcaataagtacaaatgcagcttaacaggggccttcagagttgtatctttggtgaaggagaaaatagacaatggcagggagaaactgaaggactcagtaggtctggaactggggcagcactgggtgctataagcttgtccttcaggggtctacagatgctgacacctgggaagtcatcctgcatcatctgctcactgctcactgggctcagcagctatgtcctcacaaataaccagattcaatcaacctggccttctccacccaacctggggaatgtattccagtgactgtttcaactgaggttctatgaaggggttgggggataagaagaggggactgatttgcttgaagaaaccattgcacaccctttcctttcatctaaaacctattaatggaaactctgaggccacccatagaagtctagctggtcttctaaatttgggagttacgaaggagtcattcctgatcaatctacaggataaggggccatcagcagctggtggtcagagtgaggaagaaaatggcttccttgagagactcatcagcacagccaccaactctggggaaaatggggcacttgctataacagtcaccccaaactactcacaggagcctgagcctcgtcccctcaccttattgtttctgattctggtccatgcctctgttttccctggacccctcgcccatgtctgagtccagggtagcaggggtagttccatcccagtcaacatctatacagaagtaacagctgctatggcttgaagccgagtctacagttctacccatgagggcctctttttctccccaatcccctcacacaggtgaccagtgctgtgggtctggtggagtggccactggccactggtcccaggcgaacacaaagtatttattcctctctaacaccaggcatatattggagggggtttggtgggtgtagaacagagtggttcttccagatgcaaagcagtaagaccctgtctacagaaagtcatttcacaaacctccacaccctttcatgataaaaacgctcagtgaactatgaatacaaagaaactaccctaacatagtaaaagctatctatgaaaatcccacagtcaacatcacacataatcttaaagaccaaagatatgtttttgtaatatcaggaacatagcaacaatgtacacttcactgcttctattcaaaacagtattgaaagtcctagccacagcaataaggcaagagaaataaataaacaggataacaattagaaataaaaagtaaaactatctctgttttcaatggatttaatgtcatatgtagaatacccttaaaagttccacaaaacagcttttgtcagaatgattaaatgtattctgtaatgttcagaatacaaaatcaccatgtaaaaacacctcatggctgggcatggtgactcacgcctataatcctggcactttgagaggctgaggtgggaggattacttgggatcaagagttcaaggacagcctgggctacaaagcaagagcctgtctcaagaagaaaaacgaaagaaagagagaaacaaagaaagagatagaaagaaagaaagaagaaagaaaatctcttatatttcaatacttagaaaatctcttatatttcaatatttaaacaaggacacaggaaaaaacccaaaacaaaattaataaaacaaatcaaattgcaacatcattagagagagtaaaatatggctgggcacagtagctcatgcctgcaatctcagcactttgggaggctgatttggacggatcatctgaggttagaagttcaagaccagcctcaacaatatggtaaagcctcgttcctacaagataaaataaaataaaattgctagctgtggtggcacatgcctgtaatcccagctactcaggggtccaagtcacaagaattgcttcagcctaggagggagaggttgcagtgagccaagatcttgccactgtactccagcctgggtgacagtgagacattgtctcaaagaaacaaataaataaaaatgaaacagtaaaatacttaagaataaagttattcaaagaggtgaaagacttgtagattgaaaagtataaaacattactaaaagaaattaaagaatacacaaataaatggaaagaaatcctttgttcatatactggaaaactcagtattgttatgctaacaaaacaaaccaggaggaattgacagattcatttcaatctctgaaaacattccagtaatattttatgcaagaatagaaaaaaattaaacctaaaatatatatagagtatgaagggaacctaaacagtcaaagtcatcttgtaaaagaagaccagtgttggaggtctcacactttctgatttcaaaacatactacaaagctacactaatcaaaacagagtggtatatatgtaacatacatactgacaaataaaatagaactgagtgcctagaaaaaaaactcttagttatacagtcaaataattttaaacaaggttgtcaagacttttcagtggaaacagtacagtctttcacaaatatagacgttctgggaaataatactgaatggcttttgctgttgttgtttttgaatggtctcaaatgttctctcaaagatgctgcagaacatagcttattgattttgtaagttaaaaggctgagtaagactgtgagagactccctgctcatcatcattcttcttccacttccagtgactactcttatattctgtgccataagccaacagctactgaccccaggatcttttaatccttctgtaaaactgtcattaaaaaaaaattgtctaaagtaaattttttaaaaaattctcacttaaaccagctgtttatccaatataaggctcaacacaaatagttacagaaagccagtaggtcattaaaacaattaatttagtcattcaaataaaaatgaacaccatgtaacactaatatcaaattatagtcacaggggcaggatttcagcaacagcaagagaaagtagcacaaataggaatgagcaaagaatagacaattaatgagtgtgaattggcctggaaaatattgtggcaatgtccaaagataaatccacagttatttgtgaaacaagtgaaagaccacgcattctcagtccaggaaagccaccagggggtggtctgggtctcttgaactgtaagaagctcaagaggtccaaacttcatgaaccctgcacaggtgctcattgactcatgtaaacgttagagcagctgcttcctcccacaggacaaatccacagcacacagcctccctgggctggcccctcacagtgtagctgctctcaggcctgtggacccaggtggtgataaaggcagtaaagatttgcataaagcagcacacagcacaccccctccatggagagagctcaataggagataaagagccatcagaatccagccccagctctggcgccaggggtcccttccaatatcagcaccatggcctggactcctctctttctgttcctcctcacttgctgcccaggttaagagagatttcaaataccagcctttggagggatccttctgtctgcccttctaatttctaacatgtgtctgttttttgtttcagggtccaattctcagactgtggtgactcaggagccctcactgactgtgtccccaggagggacagtcactctcacctgtgcttccagcactggagcagtcaccagtggttactatccaaactggttccagcagaaacctggacaagcacccagggcactgatttatagtacaagcaacaaacactcctggacccctgcccggttctcaggctccctccttgggggcaaagctgccctgacactgtcaggtgtgcagcctgaggacgaggctgagtattactgcctgctctactatggtggtgctcagcacagtgacagactcataagaggaaccaagacataaacctccctcggcccttgtgatgtggagattgtgtgatcatacacaccagctctcaagacagcctacatgtggaccagccatagaaaggggaaggaaagggtctgaattgatttctatccctccttgtgccctgaagtggaggaaatgtgagagtgatttgcagtaattgaatgagacaaagcaaaagttatttgttttatatgaaaaaaaaaaacagaaacagcaggatcagatctaaaggctgagtctaaatgcatttcctccagacagaagcttcttcaaacgatgggctttctgagctaagagcaaagaaaataaactctccacgggtatattattaaagtttattttattgagttactttcaaagcaatccatgactattatataaagtcagaaagtattaaaaatcaccaagttctctgctaagctaccttatcccatgcaatcaaaataagtacttttcttcatttggatgcattttttatttctgtttttaatatttccacaatggtgattaaacctggtgctcattcctctggtttgatccacctttatgctcttgtcatttaaagttaatgtaagtagtgttccatttatttaaaaggataaaatattttaatagttgatcattgcattttgaactgagtaccagtgaagtattctagcttttaggtaatttcaattgtttgctagtcaatgatgttatacgttgttgtcattaaaccattcctggtcatttctgtggattttgtgaggtcagagaaaatgtctgtgcttttcaatggaaagccttgggtacattattcctgacttcccaacgcacaaaatagagaaacacaaatttcctgctcatgttagttagagcataagagattcaggtacgaggaacaatttataccccaaactacatacagtgtcttcaggcatgtattagaagtgtacttctcaaactctctgatacccttagttctgaagaagctcaaagttggctaatacttttatatttatctttttattttttttacctcagccagcactttctcctgattcctggggttttctgcatttccagtgaatccagtgaatcacacaaataggctaactgattcttcccaaactccagcactctcccttatgtgctgatctagtgaggaatcacatgggaagagagacccatggatttctggcggcctgggaagtgagttcatggctggcctcagcttgcaaaccagacacttgtctccttgtttccctttactgttcattgggttcagcagctgtgtccttccaggtttcctggacagtgatggaccacactctcccaactcccaaccacccgctcctcaaaaggaataaccagactcagcaacttatgtgaggggcacagccaggggtcaggatagattggcattaagtcccctcaattaagagaggccagggaaggggggctgttccccctaatccgtgtggctcaggaagcagagctctagagacatctctaccatggcctgcaccccctcctcctcaccctcctcagtcgcggcacaggtggctggagacagggagtcagggactggcactggcaggaccagggctctgctttgctcccctggctcactgagctgcctccctcaccctgtgtctctctcccgactctcagggtcccgggcaatcatggctcatcaggtaacctgcaccgtctgtctgtggctaaaccagccaccatctcctgaactggaagcagcagcaataaggttcttggaattgtgacctggtgccaacaatgaccaggaagtgcctccaagcttctgactcatagaagtaaatatctgcccgcagggattcaggacagacgctcaggctaccagtcttgcatgaagcccttcctaagcatctctgggctttaggctgaggacaaggctgatcactcctgttggcttcagacagccccctggaggtccaaacagtgctgcagtctgggaaagtgagatgagaacacgccaggtctcctaggagcatgaccttccaatggcaccacccacaaccaggacagctggtctgtttaccatttgtgtggatgtttcttgatgctgccgctaaccagggcccaagacttagttcggggacagtgatctagagaatacagctttgttctctcacagccagccctcagaggaagcccttagcaacagcattgtcagactgcctcaaaaaaatcagtctttgattccaggaacaggctgccctggggacagactcaagatgagtcagggtaagcagggacagaatccagctgggtctgcctcaggcatgtgcactaacgcaaaggtctgttcatccttattgtctactaaacacctattatgtgccagtctcaggagagtgctcaggatacagagtttacaagacagacagggttcctgtctttacagggataatgcctcacagaagagtgagcaccaacaaatcaatgagaataaggcatattgtgaggtataaaatggttgacatgggccagaagacagtgagcaacaagaagctattaggaggttgtaagcaaggagatacagactctggtttgagattcaggaggcaaagtccagcttctctaaggaagatgaaaaaggaggggacagagtgaagaaagatggtccagttaggacatggtggctttgtacacatgagagatgaggtttctggcaagtaatgtggcagctgagctgaggcctgtgctgtggatcccagacgggagccacctgctaggcctaggctggagccctctgcctctgctcacgaggaccagcagctgtgtccttacaggtccttagggagccacagaacagccccaccctggtccaccccatcccaggctcagctttctaggcaagggtcagagtcagggcctagggtgggacttggccagcccaggggaggaggctggtgtgcatgaagagaccctccttcatcctgggctgctggcgaaagtaatagggactgggggagctcaagcccagctgagtgtcatcaggatgcagagctgtgtgtgggtccccaccaaggcctgagctcctccctttctcccccttctcattcactgcacaggtaactagggctagggatcagggctgtgggtgaatggaacgaggaccctgcatgctgccctctcaactgacccacctctctcaccctctgttagtccaggtgtcaaggttctgggcccagtctgtgctgactcagtggtgtgaagagttcctgtgggtggggtaaactgccgccatctatcacacttgaagcagaagcaaggctgggtgtgggcctgtgtcctggtatcagcagtgcccccaaactcctcatctatgacagcagtcattggtctgcacaggtcccagcgaagttctcaggtcccaggttggggatcatggcatccctgagcatctctgggctccaggcagagaatgaggctgattctttcgctcatcttgagacccaaggatccatgattaggcagtgctgcaggccagtgggtagctgggaggaaaaccttctgtctccccagtaatgtgtcttccctcttcagcctccaccccttcagcacaagtttctggggaggagggtctgaagcccgggtgagaaaaagggtcaaggctggccttaggacctggatgggcacagtgaccccctgctgagagggccttcatgagcaagaaggctgggggaggtcctgagttgatttttacaatggaaacagacaccagctccccatccttgttcaaaagcatctcaggaccttttcctctgcagatggcaagggggagaatctccctctgagatacatgagaattcccttcccatgacctgtcctgtcacctggatgaattcgtatttggaaaccaaatgactccccagtgccaggcattacatcctcacagaaaacctgccagaatgagcaagatcttccctccctgacccactggccaggaatctcggacatcaggatggctggactagatcactcatgccatctcccctgacatcatcatggttaccggggggactctctgattaatttgggccacacagtgcctgtccctggcattgcagttggggacgcttacaggctaagtttatggctgggagacctagggtctagaaaggagaggaatagaacagaagctttgcctacatggccccctgtgtgcatcactcttccctccacctttatcctaagttcatgatgggtgatgtctccttgaggctggaacctgggcagtgacatgggcctgtgtgtcctcatctcacaatgcttcatcttgggctccctgacctttctgatattcctataatggatcaatttcaggctaggacacagccatgcccatacaggaggcagtgatctgagaatcaggtagtcttagaagagacagaaagcaaataaacaccctcatgttggcctcctaagcccagaggacataaggaaatgaaaggaattcaagaagaaacataagtggtcactgcccaccatcacctgggcacctgttctccacctgcccctctctcagtgaggaccagactcagaggcctagagaaacacgtcttcatctgttcacaccgtggggtgcctccttctggactcatcccaagactgctgctcccccagcttacctgtgtaactgctgagagtcttcacagggacctggtcacagggtttgggatcaggatcagcctggctttaactcagctgtgaccctgccccttcaggacaaaaagtgaactattagggctctaactgaactctcctgatttacttaaatcttatattctccttctcaatatccttctaggaagttctgtctctacccaataatgtcaggtcatttcctcaggcctagagccatttgatttccagacttctatactcacacttatgctctcattctctgtcatggttcatttactacgcagcagctaatgaggccaaccatgtatctacagcccattgacatgaaaaatggggaggagagggttccttagataaatacagggttagcaaaggaaagtttcttaggaatcacttcaggatccaagaaaattcattccagagcttcgagagtttacaactcaaaaacaacagcataatatatgaggtggtgaatcttcttggccttctcaatgaataacctcagaaatggtcagagaatatgcttcaaaaaggtaagagtatgactttcacaaacatatagtattcacatatgtcaacaattttaattggtttatgtattttggagaaaaacagtatgatgataaataaatgttaaaaagcatttttaaaaactcagtgcttatactccaccaggatagaacctgtgaaggaaatttctgtgttgaagatacactgtcttttagaataatagcaacatagctatgaattttgtcttctcatctcacaatctacaaattaaaatcaccccatttatgtgaaatatctagaaaaatacaggtacatttggacattcccatctgccaccacccatccatcttctcctaaagtggaatccctctgcccccattctgctcctctccacacatctacctgctaacacgtgactcctccctgccttcctttccagatccctagcagattgggcccaccaggggaacaagctcttggacctggggatcaaaagtgcatcttgttggacttctgaggacttgccctgcaagggtctctttctggatcacaatccctctgttcctgggcatccccttttgctggatcctgttatttatctctgtgttactccatctaggtctactctgtggacttccctgcatcttcacctgaaccccaggaatcttcaagtcatgccaatattccctcagttctcctgaaatgtcttattttctcttctcctgagatcccaccaagtcatcccttctgagacccctgagtgtagcagggccctctctggtctctttgcttcaattatgaatgaggagaatgggaggtcctctttgccgctcctacccctgtgttgccatcaggatcagcttcatgaggcagaatgaggctgtctagatcaacatggctttcccaacattgagctctgtgcccagcacaaggtaggtgctcagtaactatttgagaaaacctacatttcatcacactggccacattacactgagtccaggatggggatgaactgggagaagcagtggtggaaatattcctctctctgctttcaggctaagaactgatgggacgttcaccagggagagcatcccttggcagaaagggggccatgggcatccttgtcctgtatgggagacactgctcagcctgggggaacctctgttcatgaaggtgggagaaaaagataaacaaaattcactgtgaatgtctatgtatcatcacagaggaggcaatgacaagaaaataggaagtgcaagcccagttacaattggtttctactttaaaagaaataaaatttaatatgcctggtgtgttatgtaaacacaacaaacatttttcgaaaactataaaaatatttaaagtaacatggtttacaataaataggaacatttgaaataatgacaccctggaaatgcaatcctaaaatacagcatacattttatttcagttatttatcttgactggttttatttaaatgtctatattagagatcactacttcattgtggatttttgtttgtttgcttgtttgttgtttttgagatagagtctagctctgtcacccaggctggagtgcagtagcacaatctcgacttattgcagtctccagctcccaggttcaagcacttctcctgcctcagcctcccacgcacctgggaccacaggtgcgcaccagtatgcctggctaatttttgtgtttttagtagagatggggtttcttttttttttttttttttttttgagaccgagtcttcctctgttgccaggctgaagttcagtggcgcaatctcggtacactgcaacctctgcctcccaggtttaagcaattgtcctgcctcagccttctgagtagctgggactacaggcacccgccaccatgcccagctaattttcacatttttaatagagatgggatttcaccatgttgcccaggatggtcttgatctcttgacctcgtgatccgcccaccttggcctcccaaagtgctgggattacaggcgtgagccactgcacccggcctaagatggggtttcatcatgttgaccaggatggtctcaaactcctgacctcaagtgatccactcacctcagcctcccaaagtgctgggatgacaggcgtgagccacagtgctcgacctagtacattgtttaaatggtgcatgtaaaacctcatggtactacaactgcctggtgacagactcaccagagtaaataactatcctgctgttctccaaccacatgggattgccccaaaaaatatttgttgaatcccaggtgtatcatgccagaactcttgcagtcatatatacaatctgtttcattttaataaataggattatcttttttcttcagtttactgtttttaatgtatcatattctagatttcattacacatcaaagatgaataatttctatcatctttcagacatgcccaaaacactcattagcgattttgaacagtattctttcctaaacatcctagttggaatggttgatcctaaaagctaccacgtgtcaggctcacttaagtacagactctggtcaaaacaagctgaagttttaactcttccatcttcaaatactgagcatatttgcttgttttgctctttagcaaaacactgcaaagtcatttgccaggatcccccgcagattggcattcagtgatggagaacagactcctaggtgagatccctggtcacaggatcccgatgactatgactgcaagtctggaaaagaagagacagaacaaagatttaccagcataaccctctgagaatgtgccccaggcatcccggagggaagagctccctatcgacccaggactgcagaatccacagaggaaggagagctctggccaccagggagcagccacacgagaggagaggacccagtgcccccacaggtgaggaaatgagtccatggggctggtcactgctctcgatttcattctgacataagaggactttgtgtagtcaccacctgagtcctatacagtgaacagccaaggagacatggacagattcacccctgaggaacccagtagaatgtgaagtctgccctgagctcacgaaaaaaatgactcagggggctgcctggcctggccctgatggagggggccatggacagaacaacggggagtgaggggtgtctctgagaggctctggtcaccttgttatacaatggtggtgtacatgaccaaaatggacaccaggggatgcctgcgtaccattactgagaagactgggtgtgatgagagcaggaccagcgccacctgtcctgcttggtgccctatgcttagggcttacagatgtcaactctgcaccccctgggaccacatagccccacccctggcactctctgacatcctcaggcagaggagcctgacccagggcccaaggtgggatcagaaagctggagggtctgatttgcatggatggaccctccttctctcagagtataaagaggggcagggagagacttggggaagctctgcttcagctgtgagcacagaaggcaggactcgggacaatcttcatcatgacctgctcccctctcctcctcacccttctcattcactgcacaggtgcccagacacagggtcaggggaggggtccaggaagcccatgaggccctgctttctccttctctctctagaccaagaatcaccgtgtctgtgtctctcctgcttccacggtcctgggcccagtctgtgttgacgcagccgccttcagtgtctgcggccccaggacagaaggtcaccatctcctgctctggaagcagctccgacatggggaattatgcggtatcctggtaccagcagctcccaggaacagcccccaaactcctcatctatgaaaataataagcgaccctcagggattcctgaccgattctctggctccaagtctggcacctcagccaccctgggcatcactggcctctggcctgaggactaggccgattattactgcttagcatgggataccagcctgagagcttgcacagtgctccaggccaatggggaactgagacaagaaccctcttcctcctccgccaggagggtgagtgcctgcagctgctgctcacacctgacctgtagcttctgctgctgtagcttcccccatgggcctcggggcatccagggccttgcctaggagtggaggctccaccacttttgtcctcagagtcaggaacagggaccccaggagacagaatatcctgctcctcagcttgggacacagggtctctgcactgaaatcgtgggctgaggtggcaggtccaactgtgtcttcacagtccttcctgtgcctgcccatggtgtggggacggagtgaggaagtgtgggccattgagcttcactagaggcctgagggagcagaggtgctcccgaagacctggactccttccgtcaccctcctcccatcactctcctcactgtagctgtggccaggtgagggctcagggctacttgaggaccttgctcaacccagggcctccatcccaggcattgtttccaaactctgtaagggctgtctctgaatctgtagaaacatttatttctatgtgcccaggactgggttagagggcaccaaccccaccccttgcaaactgctcatcacctctcagtgaaacaatgaggagaagaaagagttagaaatcagaagcctccccaaggctcccctctctcctctcaaccagcctccccttggcttcctccttccacagaaataaagaggaggcagccacagaaggcaagggaaggtccaggcattataccaggcagtggagccagccagtccccccagatggtggagggaggtggtggaggtgtctgggaccagaaaatagtgaggaccctcttactaaagtgaggaggggtggcataaactgaggctcagatggtggaccagatctcctgagccatctactcatttcttcttgagtttcagtttcagtaagaataggataaaaaaaaagtctgaagaggttcctttcctcagataagaattcgtagaggattattgcccactcaggcattgaggggaggctgagcctccctctcaggccaatagaactgggggctttcatgggaatttgattgtactgaagctcccagactctgacatctaagacttatgctctcgtagcagagcccagcactgataccaaaatggataaaggctgattgataagcctggaatatcctagctgacaccgacttgtggaaaagagaatcaagttagaatattgatgtgataaggtggcatcgcacagtgaggagaggagagcttgtgtgggggagggtagaggagccattagagggttggacaaagaggacacagaatctgaggtaagtttgtgaggaaaactccagatgcttcagagaagatggacaaggaggtaggcagtatgaaggccatgggaccagctctagtcaccgggagtgagtggtgagattcagcaccagtgtctggggaggaggtactgaagcctgggtgaggggagatgctcaaggctggccttaggacctgagtggggcacagtgatcacactgctggggggtccttcaagtgcaagggggctgcaggaaggctcgagctcattgtcacaatgaaaacttagacaacagctccccagacttgttcaaaggtgtcacaggactttttcctctccacatggcaacggggagaggaaaacttatctctgagatatataagatgtttgttctccataacctctcctgtcccctggctgaattcctatttggaaacaaaatgactctccagttttacatatgacatcctcactaaaaaaaaagttccagaatgagaaagatctgccctccctgacccactggtgaggaatctcagccttcaggacaaccagacgaaatcgttcatgccatctcccatgacagcatcatggggaccagggagcatatcttatgggtttgggccacacactgcctgtcccaaacattgcagctggggacacttatatgctgaactcatggctgggagatctggggtctagacatgacaggaagaggaaaaagaccaggagctctgcctaagtagccccagtgtgtgaatcactctaccctccaccctcaacttcagttcgtgatgggtgttgtcttgcgaaaactgacagctgggctgggacacaggcaagagagactctgacccacaaatctccatcgtgggctctctggcctttctgatattctttttgcacatcaattctgggccaagacacatccatgctcatcaagaaggcattgataggagaatcaggtagcctccagagagacaggaagcagataaacaccctcatgttggcctcctaagctcagaggagaaaaaaaagggaaagaagttcaagaagccacactagaagccactgatcaccatcacctcggcacctgtcctccatctgcccctctttcaagtaaggaccagactcaggggacagcacctgcacctccctttctgtccatgcactgtgtagggagcctccttctgctctcatctcaaggcgactgctccgccaggtcagccgtgtcactgctgagagtcttacctcagtcctggtcacagggtcttggatcagcagcaacctggctttgattcagctgtgaccctgccccttcaggacacaaagccgatgattaaagcctaactgaactctcctagatttctcaaaccttagattctccttctctgtgtccctctagaaagtgccacctctaccaaataatttcatgttatttcctcaggtctagagctatttgattaccaaaattctatactcactcttctgctctcattccttgtcatggtccattttccactcaggagctaatgatgccaaccctgtatctacaggccattgtcacaaaaaaaaaaagaaatgagagggttccttagataaatacagggttagcaaagaaaagtttcattaccccttaggaattactccaagatctaagaaaattaattccagagcttcaagagtttactcctcagaaacaacagcatgaatacattaggtagtgaatgttcttggtcttctcaatgaataacctctgaaaggttcagagtatacgtttcaaaaagataagtgcataactttcacaaaaatgtaatcttaacttatgtcatcaattttaattggtatatatatttctggaaaaaaaagcagtatgatggtaaaagaaatgtaaaaaagcctttgtaaaacccagtgcttacagtccaccaggatagcacctgtgaagcaaattttctttgctgaagatacaccgccttttagaataatagcaagatagtttgaatttgtcttcttctctcacaacaatctaaaaattaacatgatcccatttatatgaaatatctagaaatatatctgtacatgtggacattcccatcgcacacctcccatccaggctgtcctaaagtggcatctcctcttcttctgctcatgttctccccctctcctcacctctcctgctgacacgtggctcctccctgccttcctctccagtagccccagcagatcaggcccaaccagtcaacaagctcctggacttggggaacaaaagtacatcttcttggatttctgaggacttgccctgccagggtgtctttctcaatccaatctctccttcccggcagtccacttctcctagatcctgtaatttatctaatcttattcatctgtatctacttcgtggacttccttacatcttcacctgaacaccaggaatcttcaggtcatgcccatatgcccttggttctcctgtagtcccttcttccttcttcccctgtgatgccaccaagtcgaagtctcttctcagaccctggagtgcagcagggacttctctggtctctgccccagggattaagggggtggaagagtggactcctgtgcccttcctatgcctgtgttttcatcagggttagctgcaaaaggtagggattaggctgtctaggtagggattatggcattaggtagggattatggcatttccagagctgagctctatgcccagcaaaagatacgtgctcagcaactacttgacagagacctacctcttatcacatgggacacattatactggacccaggatggggctgaactgggagaggtagctgtggacctgctcctcgctctgccctcaccctaagagctgatggggcatccaccaggaagagcattcctgggcagggagagggccatgagcagccttgtcctgtatgtgagacacagctcagcccggtcacaagatccagatgactatgactgcaattcaggggaagtagagaatgaagattgaccagaataaccctctgggaatgtgccctgggcctcctagagggaagagcttcccttctattcagcgctgcaggatccacagaggaaggagagccctggccaccagggaggagccacatgagaggacccggtgtccccacaaatgggaacgtgagtccatgaaagtcggtccctgctctgggtttgattgtgacctatgaggacattgtgtagtcaccacctgagtcctctacaataaacagtgagagcgccacggacagattcactcccgaggagcccagtaaagtgggaggactgaggtcacagggagaagacacaggcaccacctggcctggccctgacagggggcagtggacagaacagtgcggaggcagtggggtctctagaggctctggtcaccttgtcataccatggtttgtctcggtctggacactagagggcacttggggatcattcctgagaagactgaggttgatcagagcagaaccagccacctgtcctgcctagtgtcctctgctcagggctcacagctgcgtcctttacacccgtgggaccacacagccccacccctgccaccccctgacatcctcaggcatagggacctgacccagggcccagggtgggattagaaagctgggggtctgatttgcatggatggaccctcccactctcagagtatgaagaggggcagggagagatttggggaggctctgcttcagctgtgggcacaagaggcagcactcaggacaatctccagcatggcctggtctcctctcctcctcactctcctcgctcactgcacaggtgactggatacaggtccaggggaggggccctgggaagcctatggattcttgctttctcctgttgtctctagaagccgaataatgatgcctgtgtctctcccacttccagggtcctgggcccagtctgtgctgacgcagccgccctcagtgtctggggccccagggcagagggtcaccatctcctgcactgggagcagctccaacatcggggcaggttatgatgtacactggtaccagcagcttccaggaacagcccccaaactcctcatctatggtaacagcaatcggccctcaggggtccctgaccgattctctggctccaagtctggcacctcagcctccctggccatcactgggctccaggctgaggatgaggctgattattactgccagtcctatgacagcagcctgagtggttccacagtgctccaggcccggggggaactgagacaagaacccacttcctcctctgccaggagggtgagccccggcagctgctgctcaggcctggcctgtggcttctgcggctgctgcttccctcatggtcccaggggcatccagggccctgcctgggagtggaggctcctcctccccttctgtcctcagagtcaggaacagggaatccaggaagcagaatatccctctcccttaacttgggacacaaagtctctacactgaagttctggactcaggtggcagatccagttgtgtcacctcagacccacctctgatagggaacccatgtattcattattctcctttccccaattccaggagtttccggagtggtgtcttcctctccctgctcctcaatgtgagtccctgtgtttcttttctcccaggcctattctttttttttttttttaacaaaactcctttcatgaaggaaaaatgcacacctaataaaccagctgaatttatagcattaaattcggcccattttggcatttttctggatctttgaaaatatcaccaccactgagctatgcaacctctgactaaccccagcagcccttcatgatgctttgtcatctccttcactccccgaatgccctcctgggcagccaggaatctgcctttgccactactgtatggtttccattttctgaaacttactagtgttatcaaacactatcttcccatttgttcgagcttctttcactctgcacacttcttttcagattctccctgctgttgctgaattgcatcccattctacagagggctcattacaacctttgagggtctaggacattctcttctgattctatttatttacttatttattttaaagtttgaattcattgtccatcaaatcaaactctacgggtgatgttcatctaaggtgacaggagtcagtgagggcttctcaggattcttgcttcttcatctcttccctctaattctttctataatgggagaatttcttatctttttaaagtttttctatttattattttatgttggcttttaaggtttttagtgttttttaaaatttttttatttcaataggtttttgggaaacagatgttgttttgttacataaataagtttgttagtggtgatttctgggattttggtgcactcatcacccaagcagggaacactgtacccaatgtgtagtcttttatccctcaccccatcccaccctttctcctgagtccccaaagtccgttgtatcattcttatgcctttgtgtcctcatagcttagctcccatttatgagtgaaaacatatgatgtttgcccttttattcctgagtgaattcacttataatgatagtctccattccatccgggtttctgttaatgccattatttcattcctttttaaggctgagtagcagtctacatatatatatatatatatatatatatatatatatataccacatttgcttcatccactcattgattgatgggcatttgggttggttctatgtttttgcaattgcaaattgtgctgctataaacatgagtgttcaagtaattttttcatgtaatgacttcttttcctcttggtagatacctagtagtgagattgctggatcaaatggtagatccagttctttaatgaatctccacactcttttccatagtggttgtactagtttacattcccaccaacagtgtaaaagggttcccttttcaccacatccatgccagcatcaattattttaatttttttattatgcccattcttgagggagtaaggtggtattgcattgtgactttgattttcatttctctaatcgttagtgatcttgagcattttgccatatgcttgttagccatttgtatatcttcttttgagaattgtctattcatgtctttagcccactttttgatgagattgtttgtttttttcttgctgattagtttgagttctttgtagattctggatattaatactttattagatgtatagattgggaagattttctttcactctgtgggttgtcagttaactctgctgactgtttattttgctgtgcagaggctatttcatttaattcagtcccatctatttatcttcgtttttaatgcatttcattttggattcttggttataaagtctttgcttaagccaatttcttctagaatttctaaggtttcatgtcttagatttaagtctttgaccaatcttgtgttagttttgtataagatgagagatgaagatccattttcattcttctacgtgtgacttgcctattatctcagcaccatttgttgaatagcgtctccttttcccactttatgtttttgtttgctttgtcaaagatcagttaactctaagtattttgcttcatttctgcattctctattctgttacatcggtctatgtgcctatttttataccagtaccatgctgttttggtcattatggctttatagcatagtttgaagtcaggtaatgtgatgcttccagatttgttatttttgtgtagacttgttttggctaccggggctctttcttggtttcatatgaattttagttctatgaagttctgtgaagaatgatggtggtattttgatggaaattgtattaaacttgtagattgttttggcagtatggtcattttcacaatattcattctatacatccatgagcataaaatgtatttccatttgtgtcatctgtgacttctttcagcagtgttttgcagctttcctggtagaggtctttcactttcttggttaggtatatttctaagtattttagttttttggcagctattgtaaaaggggttgagttcttgctttgattctcagcttggttgctgtcgttgtatagcactgctactgatttgtgtcctttaattttgtatcctaaaacttgctgaatactttcactagtgctagaagcatttggggtgagtcttcagggttttctatgtatacaatcatattatcagcaaacagtgacagtttgacttcctccttatcagtttggatatccctgatttctttctcttgtctgattgctctggctaagacttccagtactacgttgaatagaagtggtgaaagtgggcatccttttgttgttccatttctcaggggaaatgcttttaacttttccccattgagtataatgttggctgtgggtttgccatagatggcttttgttgccataaggtatggtcccttctatgctgattttgccaagtttgaatcataaaggatgctggatttcgttagatgccttttctgcatctattaagataatcatgtgattttgtgttttaattctgtttatatggtgtatcacatttatcaacttgtggatgttaaaccatctctgcatttctggtataaaagcaatttgatcatggtagattatctttaagacagctgttggatttgggtagctagtattttgttgaggatttttgcatctagattcatcagaaatattggtctgtagtttatttttgttatgtcctccctggttttggtatcagaatgatactgtcttcacagaatgatttagaaaggattcccattttctctatgctgttgaatagagtcagaaggattggtaccagttcttctttgaatatctaatagaattcagctgtgaatccatctggtcctggattttttgttgtttgcaattttttttattaccatttcaatctagctgcttgttattggtctgttcagagtttctacatcttcctggtttaacctagtagtgttgtatatttccaggagttcatccatctcctttaagatttctagtttatgtacataaaagagttcatagtagcctttaatgatcttttgtatttctgtggtatcaatagtaatatctcccgtttcatttctaattgagcttatgtgggtcttctctcttcttttcttggttaatctcgttaatggtctgccaattttatttatcttttcaaagaaccagctttttgtttcatttatcttttgtatttttttttgttttgacttcatttagttctgctctgatcttcattatttcttttcttttcctgggtttgggtttggattgttgtggtttctccagttctgtgaggggtgaccttagattttctacttgtgctctttcagactttttgatgtaggtatttaatgctataaactgtcctttaagcaccacttttgctgtatcccagagcttttgacaggttgcattaagatttagaacaattgcaatcttactatcaatcaacagctttttaattcctgaggatgtgacctcatttaatcctgacaatagctttattattgcttttcaggcagtagaccgtgattgaagaggtaatgctttgtggcctggaggtaaggttctaaaatttatcaaatattaaattggtgcacaagtaattgcaggttttacaaataaaagtaatggcaaaacccacaaggacttgtgcaccaatgtgatataaacactggaggtcagttaaatttgaattcagtaaaaacaatgataaagaatctgtatgtgtatcacccacacagtattgttcaattgtaatacaaacaactgggtgccctgcattttatcgggaaactccacacagggttcgcagcttgaaagaggcagagctgtggcaggcctgcccttcctgatgccaggtctaggtgcttaacgtcaaagacagagcttctctaagagagctaccctcaagtgaacatgtcagttggcactaaatacatgtgatatgatccccagtcaatgatccccactcacttccctaattctttctattatcctttaagtttgcagactcagggcctccccagaaattgctgcagcctgagttctggacctgggaccgcatgtcctgtcacaaccagatgcaaaagggctctttagtccctacacagaatggcttcagccaggagagcataaataacatgtaagattagaagagctcagaggggctctccttctgtcccatgacagatgaaacttcagggctctgatgcttgtcagggaatctccttcagtgaggccaagatcccaggactttactaaaattagcagagtggaccagacaggcatgtcatggtacaggaattgtgttcagaacaataagtgcagatgcatcttaacaagggccttcacgttctatctttggtgaaaaaggaaatagacaaaggcatggagaaactgaaggactcaatgggtctgggactgaggtagcgctgagtgctttgggcttgtcctggagcagtctgcagatgataacagctgggaagtccacccctgctgtgaccttgtttcatctgcccactggatcagtggctgtgtcctcacaggaaagctggctgtagccagactggccttctccatcccacctgggaaatgtattcagatgactctctggggtgaggttctactaagggcttgggagttatgaggagggggctgatttgcatgaaagaaccatttcaccccctttccttcatctaaaacccattaatagaaacttcagggccattcatagaagtccagctggtctcctacatttgtggggcataaaggatcaatgcctgatgaatgcctgatcaatctaaaggaagaggggctatcagcaggtagtggtcagagtgagaaaggaactgacttttttgagagattcatcaacacagccaccaactctgggacaaatggggtgactctctgtaactgtcaccccaaattacccacaggacactgagccagtcccctcattctattgcttctggttctagtccattcccctattgtccctaaacacgttgcccatgtctgagtccagggtggcagggatacctccatcccagtcaacatctacagagggcctcttctgttcccctctcacctcatgcaggttactactgttgtgggtctggtggagtggcccctggagaacacaaggtatcccttcctctggaaagccaggcatgtaatagacatggtatgggttgatgtagagcagagtggctcatccagatgcaaagcagtaagaccttggctacagaaaattatttcacaaaattccacaccctttcatgacaaaaacactcgatgaactataaatagaaggaaactacctcaacatagtaaagaccatctatgaaactcccatagtttacatcacataaaatctgaacaaccagagacattttctgtaatatcaggaacaaaccaaggatgcatactttcacatcttcaattccaaatattattggaagacctaggcagagcatttagcctagaaaaagaaataaacagaataaaaactagaaataaaagtataaaattatctctgttttcagatgacataatgtcatatgtagaacgccattaaaagacccagaaaataattctgaaagaatgattaagtgaatttggtaatgtttcaggatacaaaatcaccacttaagaacatctcatggctaggcatggtggctgacgcctataatcccaacactagggaggctgaggtgggagaattgcttggggtcaacagttcaagaacagcatgagcaacaaagcaagaacctgtctctaccaaaaataaaaaaataaaaaggaaggaaagtcacttgtatttctatacttaaccaaacaggacaccacccaaaatgaaattaagaaaacaattcaagaggacccacagaccctctgaaggaaggggactgcacccgcaggacccgggagacaccgcaaatactgtgagtgcctcaactgcggaagtgggaaaaggagaccctcctctcccaaacacacacccctactgaagaatgtgaaagtctgttagcaggagaagttctcaactttacctggaacggagttaagttagacagccaagctcagtgaaatacacaggtgtaggaggtagcggggaggccctgggaacttgctgaatccccaagcaacccattcctttctggcaccacaggaatacatcaggaaggaggacagacaagcagcgggtaaaactccacgggaagaaggacttccctagctgaactttgcaacaattcgaatcgggtgagaggcctcctggctctagtatccatggcactagtatccatggctgagaggcccatggatagttcacatcacaggactctgtgcagaaacccccagtaccagcccagagccgggtagacttgctgggtggctagacccagaagagaaacaaaaatcactgcagttcagctcgcaggaagacatccacaggaaaagggggagagtgctacatcaagggaacaccccatggaacaaaaaaaatcttaccagcctttagccctagacctctcctctgacagagcctaccaaaatgagaaataacttggggggaagagtgggagaggggcgaggagtaaaagacaacaaacatggtacagtgtatactgctcaggtgatggctgcaccgggatctcacaaatcacccctaaagaacttactcatgtaaccaaacaccatcttcccaataacttacagaaaaaaaaaaaagaatattataacaatggaatcatatattatgcagcctttcagcattggcttttttcacggagcacaatttccttgagatatatctgagttgcgttgtatcaattatatagtttgtttctttttattgctgagtaatgtttcatggtacggttgtatcaagcttgtttaaccattcgccagttgaggaacatgtggattatttccagtttatttttttggctattaggaataaaactactatgaacattcttatacattaaaaaaaaaagaaaacaattcaaatttcgtcattagaatgagtaaaatgcggctggcacggtatctggtgcccataatcccagcactttgggaggctgagacgggggatcatctgaggtcaggagttgttagagaccagcctggccaatatggtgaaaccctgtctctactaaaaaaagattaaaaaaaattagctgggtgggtggcacactcagtgattgcagctactcatgaggctgaggcacaataatcacttgaacccaggagacagagtttgcagtgagaggagatggtgccactgcactctaacctaggtgacacagtgagactctgtcccaaataaataaataaatgtaaaatacttaagaataaacttaagaaggtaaaacacttgcacattgaaaacaataaaacattgctaaaagaaattgaagaatacacaaataaatggaaagacgtttttgattatgtattggaaaactcaatattgttaagataccagtagaaaccaaaataaaatatactatagagtcatcacaatctttatcaaaattccaatactacttggtacaagaatggatataattctaaaatccagatacccaaaatagccaaaataatcttgtaaaagaagaacgttgttggaatcctgacacttcctgattccaaagcatactaaaaagatacactaatcaaaacagagtggtacatatagacagacatacagacaaatagaatagaattgagtgccttggagaaaactctcagttatatggtcaaatgattttcaacaagcttgccaagaccattcgtgagggaaagaacagtctttttaacaaatgctgttgagaaaactggatatccacatgcaatctggaagtgaatcaaagacacaaatgggagagccacaactgaatcttaaaagaaaacattgggaagtaggtccacaacgtagggtttggaaatgatttcttggatatggcacaaaaaagacagggaaaacatagaaaaagaagaatatagataaattgcatttcatcaaactgtaaaacttatgtgcagcaaaggacactaccaacagagtgaaaatgcagataatagaatgggaaagattgttacaaactttatatctgataaggcatccaagctatagaaagaacttctacaactcaacagtaacaacaaaaataggaataacccgaaaaaaacaaggacaaaggacttgagtagatattactacaaaaaaagatctacgaatgtccaataagtacatgaaaagatgtacagcatcaccaattattagtacactgcaaatcaaatcacaataatatacaactctatacccattaggatggcattaaccaaataacagaaaattaaaagttctagcaaagatgtttagaaattgcaactgttacgatttgctggagagactgcagaatgatgcttccactgtggatgccttatggctgttcctcataaaatcaaacatagaattaccattttatcagaattttcacttctgggaatgtgcctgaaaaaattgaaagcaagatctcaaagagaaaattgtacatcctcgttcatagcagcattgttcacaatagctaaaaggtggaggcagcccaagtgtcaactaatgaatcaacaagatatattatacacacacaagggaatattattcagccttaaaaagaaagtctgacccatgcgatggcatggatgaacctttaagacatcatgccgtcagaaataagctgacttcaaaaggacaaaaattgtttgccagcccttatatgaggtacctagaatagttaactccacagtgacaagaagtaaaacgatgtttcccaggtatgaagtttggtttgggaaaataaaaaatttgtggagatgagtggcagtactgtggttgtacaacagtgttaatttacttaatgtcactgaagtatacatttgaaaattgttgaaataatgtattttgtgtatgaatattttactacagccaaaaagaggaagatttatgtttggtgcagtttctctacctccaagaacagtggaaacctacaggactaggagagtgtgcatgagtatccaggacactcttccttttatgccagccccacagcatccaggacacccttccttttattccagccctgcagcatcctaacaagttaagagagtcagacgtacctcattacaggtgactcagaataatatgagaaagtctagaggtggccatgatgttagcggtgggtgcccaacccagcccaggagcagccgcaaatgcaacagtggccaaagaaggggagatgaagctggtggcagaggtagcagcccctccagctggagaggggcatctgcttctgtacaaaatggttcacagttgataagtcttgcatagatgcctcatcgtttacctcatgaccaactacagttttcattgcaatgtacgttatcatagcagtaatgtctgtttcctcctgtagcaagcaaacatgaacgaaacgtgctttactgctttgtccaacaggacatgttagtcccaaacacaggctgaatgtttaaaggtaacgttctctaaagataaggatattataccatttattgataaatacggggattgcatgatgaccattcagacacttggaataattacttggctaaataacattgtttaaacaatgagtaaatttagttattctttgcagagcaaaaaagatccaagtttcaccagtcccttggcaaacactacatttcaaactatggaagggagacatcctgaaattttgtgctactctttctgaagacacagaaacagtcaagtcatacctaatacttatgagcataaagctttgataaaattcaagaattatttgcattttgaggaaaaagactttgtcgctaaagcagagaagaacctaaaacggactcctcatagtgagctaatattttataaaaaggtgtcaatcaaggtgtggcttacaaaaatactttcaaggatgtttactttccagccatctcactggacaagaactgggtggttttcattaactttggactgtgctttaatttcctaaaaatgatgtcacttactgccctgagtgacatgggatgggatgctgtggtagagcacactctggctgatgtcttgtacctgctggagacagaaaaggatgggagacacagtcctccacaggaaatctcaaatgggtccctctttcttttcagatatggactttctggggagtaatactgtagggcttttcttgttgttgcctttaactgtctcaaatgttctcccaaagatgctactgaacacagcctctcctttgagcaagttaaaagtctgggtacgactgcgagaggctcctgcctgccaacactctttctccactttcagtgactgctcttcttctgagggccgtaaaccaacaactgctcatcccaagatccactaagccctctgggaaattggtgctgtactgcataccctgcctgctgggacttgttacattgatgtattttctaaggagtgaataatcttgtccaagtaactaacttatttaaagacattttcttcggtgggcactgactccatggcacccgttttccaaggagttggtgagcttgtttctgagaatgccagaaatcaatgtacattccaaatcattctaaaagtgatttctttttggtgtgggtttggttttgttattaattttgaaatatatctttgaatactgagatctctgaaactactagatctctagaagtgtaattgggaaagaaggttgcttgcagctttaacaaaatgagaaactcttcccaaatacaacctgttttgaagttaaaaaaaaatgtgacattagaacctgcaaaatctaagagtttccaacagcagtctcaattctgatgctaactgtaagctagggactcccccaacaacgcttcacttcttatgattcccaagaaggactcacatcactcactgaaacttgtgacgtttgttgatatgattttttacaacaaaagaatgcagattaaaataattcaaggaaggaggtacatgggcagagttcaggagaattccaagcacaggcattcagttgtcctctcccagtaaagtaatagacaatgctgcattctcctggcagcaatgtgtgattctgtgcatgaattattgccaaccaggaaagctcgctgaagcttggtgtccaggcaggtttttttgggggtgtgagttggggatggggttgcttatgtagaccttgttgatcatccttatggctgactccgacttgaatttccactgaattgacaataaaacttcaaccttaaatatttggttattttctttttaataaattctctaaaataaattattttgaaaatgctcgctttagctagctgtttatccaatatgagactcaacataaatagtttcaaaaagccagtgggtcattaaaacaattcctttagtcatccaaaacattcagataaaaattaacaccatgtaacactaaaatcgaattatagtcactggggctggatttcaacaacaggaagagaaagtagtacaaatagggatgagcaaaaaatagacaagtaatggatgtgaattggcctaggaaatttacagtggcaatgtcaaaaaggtaaatcaatagttatttgacaatacatgctcagtccaggaaagccaccagggggcggtctgggtcgtctgcatcataagaagctcaaggagttcaaactgaatgaaccctgcacagttgctcactgggtcgtgtaaaatgttagagcagctgcttcctcccgcaacacacggccactctgggcagtcccctcacagtgtggctgctctcagggctgagaacctgggtggtgctaaaggtggtgaatgtggtaaagatttgcataaagcaccacacaacacacctcctccacacagggatctcagtagcatcttcaaaggatgggctttctgagctaagagcaataagaagaaactttctaaacttactaaaatttatttattgagttatgttcaaagcaatacatgcctattacataaaatcagaaagtatttaaaatcaccgagtcctcggcaaaggttctttattccaagcaatcaatatgactatttttttttatttggatgcattctttcatttttgttctcagtatttccacaatggtgatcaagccttgtgctttttcatctgcttttatacccctttatgatctagtcatttcaggttaatgtaagtagtgttccatttcttaaaagggataaaatatttaaatagttgctaattttatttttatttgaataccaatgaaatattatcatttttagataattcttattgtttgctactcaaacgaagatatgatattatcttattattaaaacactcctggtaacttctgtggattttgtgaggtcagaaaaaaaatgcctgaaattttcagtggaaagccttgagtacattacacctgacttcacaatgcagtaaatagagaaacaagagtttccgattcatgtaagaaggagcataacagattaaggtatgaggaataatttatatccaaaactacaccagtgtctccaggcatgtgttagaacagtaccccccaaattctgttgtgcatatgcatcttctggggattttacaaaatgcagattctgattcagtggctctggagtgaggacacagtctctgcatttctagaaagttcctaccacacaaaatccacatatatgtttgaacaataacaaggccagccaggagaagaggctcaggtgtgtaatcctagcactttgggagtttgaggcaaaagaattacttgaggccaggagtttgagaccagccagggtaacgtcacaagatcttttctctacaaaacatgtttttaaataataaaaaatgaattagccaggcgtagtgtggcatgcttgtcatcgtagatacctaggaggctgaggcaggagggtcgcttcaccccaggagttcaaagctgcgatgagctatgattatgccactgcactccagcctgggtgacaaagtgagaccttacctctaataacaaaaacagccataacaaattcataagaatagtgtaaaataaggagaaaccttggcagacaataacctaagagatatctcagacatagtgaactaatgtgtttggatgacagaagaaccccacacttggctggctgtggtgactcaggcctgtaatcccagcactttaggaggccaaggcgggcagatcacctgaggtcgggagttccagaccagcccggccaacatggaaaagccccgtctctactaaaaatgcaaaattagccgggcgtggtggcgcagcctgtaatcccagctactcgggaggttgagccaggagaatcactggaatccgggaggcggagtttgcggtaagctgagatggaacgagccacactccatgcaggaagacgaccagggaggacagctgcaaagcagggagaggctcccctttctttaagaaacaaaacaaaagcaaacaaacaactaacctgacctcccctctggctcccatccaacattcttactagcttctcatctagtcttttctgtagtgtagcccatccttaccctctcccctcccacatctctgattcctgaattcccttcttgggtctctctccttttcctgtcaaccacttctcccctctatcatcctgagttaattatcaagagctttatagcaggaagcctattggtatttttccagattttttttcttggaattggacattcatacattttctctctttttttgggggggtagggtggggtgggggtgggggtagggacagggtctcaccctggttgcccaggctgtggtctcaactcactgcaaccttcacctcctgactcaagcaatcttctcagctcagcatcccaagtagctgtgactatgggcacgcaccaccacaccctgctaatatcttgtatttttggtagacatggggtttccccatgttacccaggctggtcttgaatttctgagctcaagtgatccaccctcctcagcctcccaaagtcctggaattacaggcatgagccgctgtgcccagcctattttttctcttttacgagcctctctgattccctagttctgaagtagcccagagttggctgattctcctattttgcctcagctagcacttcctccttctcctttttttttttctccttctgatccctggagtcctctgcatttccactgaatccagtgaaccacacaagcatgctcatttattctccccaaactccaccactctgccttatgtgctgatccagtgagaatcaagaaggaagagagacccatggatttctgtgcagcctggaaagtcagttcatggctggacttggctgggacaccagacacctgtctccctgtctctatttagtattcatagggcccagcagctgcatcctcccagggtgcctgaagagtcactgaccatgctctcctacccagcctcaagaagccacccagtcctcgagaagtataatcagactcagcatcttatgtgaagggaacaaccatggggacaggttagacttgcattgagtcccctcctctaagaagggccagggaaaaggggctgttccccctaatctgtgtggctcaggaagtagagctccagagacttctctaccatggcctgaatccctctgctgctcaccctcctcagtctctgcacaggaggctggagatagaaaggcagggactggcactgggaggaccagggctctgccttgctcccccggctcaccgagccacttcccacaccctgtgtctctgtcctgactcttagggtcctgggcagtcagggctcacttggtggcctgcacagtttgtctgtgactaaaccagccaccatctcctgcactggaaacagcagcaataacgtccttggaattgtgtcctggtaccaacaatgaacaggaagtgtccttaaacctctgatctgtggatgtaaatatccacctgcagatccagaactgattcttgagtgatcagtctggcaaggaggccttcctgagcatatctgggctccaggctgaggacaaggctgatcattaacgttggatttggacagttctctggaggcccccacggtgctgcagtctgtggggaagtgagatgggaacatttcaggtctcctaggagcacgacccgacagcaccacctacaactgggaaaactgggctgtttaccatttgtgttcatgtttgcttgggctggtgctagccagggcccaggtctcaggtcagggacagtgatttagagaatgcagctttgtttcctcagagtcagccctcagagaaagcccatagcaacagcattgtcaaattgcctcaaaaaaaatcagaaagtccttggttcctggaacaggctgccctaggaacagagcccaaatcggtcagagcaagcagggacacaactgtgcagaaaacaacaagttttacttagggagataacggttgactgtataaaatgagaaatatgtcacactactcacttgtaaaagtaagtttaccaatgctattcatttccctatatcactacgttgagtaaaaactctaaaatgtatgaaaccactgtagagataacttttgctgaattgctactttaacatgtcatggatcatttatttttcttgcaaaattctcattattcaccgtccttttgagtaacccccagctgcccttcaacctagctcctcagctgacctcttctccatgatgcctaccctgatggcacatgtgggcagttaggtttttctagattttaaaagttatatatgtacatgtctacatcccatggaccaagactcactctgggagtgagaaatcacaataatcatgcatagccttatggaattagtgtctagcaatcagaccatagaggtgtgaatagagacagtgactaatgagctgcagagatcagctgggccatcaggaggtaagtgtcctctaaccagcatgggatgctgggggactgccctatggtccctacacagctgctcagtaaggaccattcactcaaagaaatccaagactaggggctaagaccccgtgctcactgaggggtacttagcatctatgtcctcccatggcatggcagagtcccctgagcaggaaggtgtgtatggtttcagtaggtgctttcttccggagccctctcaaggggaaaagcaaaacttcttcctcctcagtctgcagtgtgagctgagcttcagccccagagcttagagaggggctgggcagtccctggatgaaaacacatttgcatgagcagcccctcctctgcagagtatgggaagaaaaggaggcctggggcagcccagtcccactgtgcatgtcaggctgtgtccaccatggcctggactcctcttcttctcttgctcctctctcactgcacaggtagggacaggcctcagagatcagggccagccacccaacctgattctggctcttctggtaaagatccctgaaaaacctcaccctgaaccctgcccatcaaccatgagtgtctgtgtttgcaggttccctctcccagcctgtgctgactcagccaccttcctcctccgcatctcctggagaatccgccagactcacctgcaccttgcccagtgacatcaatgttggtagctacaacatatactggtaccagcagaagccagggagccctcccaggtatctcctgtactactactcagactcagataagggccagggctctggagtccccagccgcttctctggatccaaagatgcttcagccaatacagggattttactcatctccgggctccagtctgaggatgaggctgactattactgtatgatttggccaagcaatgcttctcacagtgacacacacagatggggaagtgggacaaaaacctcaccctgctttaggtcttgttcttaaaaaattttaaattttaaaataactggcctaggcacaaactacatttggaagtactttctagttgtaaaaggctcttctctcaatttcccatccattcgtctgaagtctcagtaaaacaaaacaaaaccaaagcaactgatgacactgaagtcttggctggttgtcatatgtgctaacaccactgcctgtggagctggacttttgttcttgaaagaagcaaaatgaggctttcctagctcacatcatggtcagagcctggggacatcctagcaggtgaacagtgccctgcagcatggactctgctcttccagcgtacgggcagagacctccccttccatccccagtagtctgttctcagggctgtctgtggctcactgtgtcccaggaacaaggcactcaaatatgaaatgctgcctgaggacacaggtcagggaattctagatatagtgctgacctggctcagtcctgggtacctgcatttcagtggcaatgtcaggagatggggttaggtattagggtaactggggacctgagaccagtaaacctctatgtaggacatgacaggagagtcaaggggaggctccactgtggctgagacaagccagaggctgctccttggccacgggggaagtaggtcccatggatgtgactttcctgcagctcatcccactcaggaccatggggactgctgagcgtgggtttcttgatccctcagcgcctgtgttctcttctcctctcttacaccattggagcttcttgctgaatcagggtctagtggtgagtatgtggaaagaccaccacatctcaaggtcacctttttctgcatggggagcagcagaaacattgggcattcccgtggaaatggctacggaggcctcccagaaagagcccccaagtttatgacctaggacagcagtgatggtccctcaggggtcccagcctcattctcctgctctgggtttatccacacagcctcctggagcacctctcggctccagcctgaggactggctggttatcagtgtcacacagctgcatcctgactccatgttaccaagggttcctgttccatgtggaaatgagagaaagatctccccactcatcctgtctccccatccctcctttatccctgcctgtgaccaacaccagttcatgccaagacttcggctgtcacttgtgttactgaagcagagcacaagttcagtaaaaataatcccttttcttactggtctcccaatgcaaacagaatcaatttgtttctagaagcaaaaggagctgcccacacatggtgggtggggatgaggtagggacaagaaagaatccaccctgtgtgacccagaggcccagaagcctttagtctggttccaaaggtgtctcctcctcttggtgcagttatgctgaccatttcctgagctcagaaactgtgcgagagatgccaagaatgaagaatccagcctgtgtgacccagagacccaaacgtgagacaggaagtctgatgcttaagaaaacgtgggttcagcattctgaaaggtctagatatggcttggcctagagctggtgtagaagagaagcaagagagatgctcagccttaggtggcccaggcacagcggtcctgtcaaggggttgagctctctgcaacatggaaatcctgcagagacatacttgggaggctgtgatcccagaatgacacaaaaatgctaatggaaatgagcaggggattgtttatgggggaatggggagacaggtgtgggataagatgtggtaaggagaatgcagcctgaagaggagactgtccattgtgactcataggaggagtagggccggggcctacagtagtgataaaaggaggacctggaaggacctgggccctgaagacacacagagactggagttttggtctgtctgtgagggtcccatgaggataaaaatccatggtcagtgtcctctgtccagggctcactgtcccagctgttgtccctcctggatcctctgggtgtccagattccgtagctgtggacctgttctcctctctgtcctcagcctaagagctgatggggcatccaccaggaagcacatctgtgggcagggagggggccatgggcagccttgtcctgtatgtgaggcactgctcagcctcggtgatccctgttcattaacgtgggaggaaaggaaaacaaaattcactgtgaacatctatgcatcatcaaagaaaaagcaatgagccaaacaggaagtgaagcccagctctaatagtttgtttctacttggaaataaataaaacttaatatgcctgatgtgttacgtaaatgcaataaacattttttgaaagctataaaaattatgtaaaggaacatggcttacactaaaaggaacacttaaaataatgacacccttgaaatgcaatcccaaaacacagcatacattttatttcagttccatatatggactggttttatttaaatgtctatattaaatctcactattccatttttaaatggagcacttaaaatctcattctacggcaactgcctggtgatacatttaccagtggaaatatcaacaaaaccatccagctgttttcctccatccccatagaattccccaaactagtaattattaagagcccaggatgtatcatgccagaattcatgcagtcataggcataacctgtttcatttttcattctgatcaacagaattacaatttttcttaagcttgtttttagcttattagattctagttgtcattacagatcaaagataaataattttctatcatccttaagccacccccataacactcactactgaatttgaaccataatttttccctaaaaatcctagttggggtgcttgatgttgagagctaccacgtatcaggctcacctgaggacagactctggttaaaccaagttaaaattttaattcttcccatcttcaaagactgagcatctttgctctttttgttcataagtgaaacactccaaagtcatttgccaggatcccctgcagatgagcatttagtgtacagactcctaggcaagatccctggtcacagtatccagatgactatgactgcaaatctggggaagtagagggagaacaaagatttaccaggaaaaccctctgggaattcctccccagggaatcctagaggaaagagctccctttctcctcagcgccacaggatccacagaggaaggagagctctagccaccaggaaggagccacatgagaggagaggacctggtgtccaacacaggtggggaggtgagtccatggggctggtccctgctatgggcttgatcctgacataggactttatgtagataccacctgagtcctctacaatgtacagccaaagagccatggaaagattcactcctgaggagtctgaagactcctcagtagagcgtgaagatagccctgaagtcacagggaggagacacagacaccacttggcctgccttggacctgagagagggggcagtggacagaatggggggaggaagccatgtatctgagaggttctggtcaccttatcatagaatggtttaccttgatctggacaccagagggcgcatggggatcattcctgagaagacaggggtgatcagagcagaaccagccgcctgccctgcctggtgtcctctgctcagggctcacagctgtgtcctccccaccccctgggaccacaaagctccacccctgccaccccctgacatcctcaagccaaggagcctgacccagggctcagggtggggtcacaaacctggggggggtctgatttgcatggatggactctccccctctcagagtatgaagaaagggagagatttgggggaagctcagcttcagctgcgggtagagaagacaggactcaggacaatctccagcatggcctggtcccctctcttcctcaccctcatcactcactgtgcaggtgacaggatggggaccaagagagaggctctgggaagcccatgcgaccctgctttctcctcttgtctccttttgtctcttgtcaatcaccatgtctgtgtctctctcacttccagggtcctgggcccagtctgtgctgactcagccaccctcggtgtctgaagcccccaggcagagggtcaccatctcctgttctggaagcagctccaacatcggaaataatgctgtaaactggtaccagcagctcccaggaaaggctcccaaactcctcatctattatgatgatctgctgccctcaggggtctctgaccgattctctggctccaagtctggcacctcagcctccctggccatcagtgggctccagtctgaggatgaggctgattattactgtgcagcatgggatgacagcctgaatggtcccacagtgctccaggcccagggggaacagagacaagaacccccttccttttctgccaggagggtgagccccggctgctgctgctcaggcctggcctgtggcttctgctgctgcagcttcccccatgggtccagggatatccagggccctgcctgagagtggaggctcctcctcccctgagtcctcagagtcaggaacagggtgtccagaaaacaaaagcagggtgtcctgctccctgtagcttgggacacagggtctctgcactgaagtcctgggctgaggtggcaggtccagctgtgtcatcacagacccacttctgttggggaacctgtgtctccatcatcctactttttccatttccaggagtttccagagtggtgtcttcctcccccttctcctcagtgtgaatccctgtgcttcctttctctccagcctattctttttttaataaaactcctttcatgtaggaataatgcacatataataagccacccatatttacaatagggaatgagacaaattttggcatttctatggatccttgaaaacatcaccaccaccgggagctatacaacatacaacctgtgaccaaccccaatagctcctcatgacccttgtcacctcattccctcccccaacaccctccttggaagttgcagatctgcctctgtcactactgtttggtttctcttttctggaatgtatcagtgttatcaaacattatcttcccatttgttcaggcttctttcactctgcacacttcttttgagattctcgctgttgttgctgcattgtacccatctcgtagagggctccttactatctttgaaggtccttaggccatttttttctgattttatttatgtatttattttaaagtttgaatttattgtgcatccaaatcaaactttaggggcaatgttcatctaaggtgacaggacagtctgtgatggcttgtcgggattcttgcttcttcatctcttgcttctgattctctctatagtggaagaggttctcgtctttcatttatttatatatttatttatttactgatttatttgggtttttaagggttttagtgatttttctctttttggttatttttcaatttttttattttaataggtttttgggggacaagtgttgctttgtcacataaataagttctttagtggtgatttctgagattttggtgcactcatcacccaagcagtgtacactgtacccaatgagtagtcttttattcttcacccccctcctaccctttctcctgagtccccaaagtccattgtatcattgttatgcctttgtgttctcatagcttatctcccactgatgagtgagaacatacaatgttttgttttccattcctgagttactgcacttagaataacagcatccagttccatccaggtcgctgtgaatgccattattttgttccttttatggctgggtaatattccatggtatgtgtatgtatacatcacatttgctttatccacctgttgatttatgggcagttgggctggttccatgcttttacaattgtgctgctataaacatgcgtgtgcaagtatcttttttgtataacgacttctttttctctgggtagatacctagtcgtgagattgctggatcaaagggtacatctatttttatttccttgaggaatctccacactgttttctgtagtgactgtactagtttaccttcccaccaccagtgtaaaagtgttttgttttcaccacatccatgccaacatctattattatttttattttttgattatggccatttttgtggtagtaaggtggtatcacatcgtggttttgacttgcatttccctgatcattagcgatgtcaaacatttttctatatgtcttttgtccatttgtatatcttcttttgaaaattgtttattcatgtctttagtccatcttttgatgggactgcttattttttttcataatttgtttgagttctttgtagactatagacattagtcatttgttggatgtatagattgtgaagatttgcttccactcggtgtgctgtctgttagctctgctgattcttttgctgtgcagaaggtttttagtttaattaagtcccatctatttatctttgttcttgttgcatttgcttttgggttcttggtcatgaagtatttgtctaaagtaatgtctagaagggtttttttaatgttatcttctagaatttttacagtttcaggccttaaatttaagtctttgattcatcttggcttgatttttgcataaggtgagagatgaagatccggttttattcctctacatttggcttgccaattatcccagcaccatttgttcaataggatgtcctttttccactttatgtttttgtttgctttgttaaagatcagttatttggctccatttctggattctctattctgttcctttggtctacgtgcccacttttgcaccagtaccttgcagttttagtgactgtgagtcaaattatgctagagtatagtttgaagttgggtgatgtgatgcctccagatttgttccttttgcttagtcttgctttggctatgcaggtcttttttggtttcatatgaattttaggattgttttttccagttctgtaatgaatgatggtgatattttgatgggaactgcattgaatttgtggattgcttttggcaccatgatcattttcaacatattgattctacccattcatgagcgggggatgtgtgacatgattttttcagcagtgttttgtagttttccttgtagaggtctttcacctccttggttgggtatattcctaggtgtatttttttgcagctatttgtaaaaaggtttgagttgttgatttgattctcagcttgttcactgttattgtataacagagctactgatttgtgtgccttacttctgtatcctgaaactttgctgtatttatttaccagttcttttttttttttttttttttttttgagatggagtctcgctctgtcgcccaggctagagtgcagtggcgcaatctcagctcactgcaagctccgcctcctgggttcacaccattctcccaccttagcctcccgagtagctgggactacaggtgcctgccaccatgtccggctaattttttgtatttttagtagagacggggtttcaccgtgttagccaggatggtctcgatctcctgactttgtgatccgcctgcctcggcctcccaaagtgctgggattacaggcgtgagccaccgtgtctggccatttatttaccagttctaggagatttttggatgagtctttaaggttttctaggtatatgatcacattatctgccaacagcaacagtttcacttcctctttaccaatttggatgtcctggatttgtttctcttgtctgattgctctggcttagacttccagtactatgttgaatagaagtggtgaaagtgggcattcttgtcttgttccagttctcaggggaattgtttccaacttttttttcctttcagtataatgttgactatgggtttgaaagagtgggcttttcttaccataaggtatgtctcttctatgtcaattttgcaaaggcttttaaccatgaagtgatgctggattttgccaagtgctttttctgcatgcattgagataatcatgtgatttttgtttttaatgctttttatgtggtatatcacatttattgacttgcatatgttaaaccatccctgcatccctggtatgaaacccacttgaacatggtggactatgtttttgatagctgttggatttggttagctagtatttcgtttattatttttgcatctatgttcatcagggatattgttctgtagttttcttgttttgttatgtccttccctcattttggtatgagggtgacactggctacaaagaataatttaggaagaatttcctctttctccttcctgtgaattagtgcattagtcagggttttctagatggacagaactaatggaatctgtatatatatagcatgatcacaacatcccacaataggctgtctgcaggctaaggagcaaggagagccagtccgagttccaaaactgaagaacttggagttccatgtttgagggcaggaagcatcaagcataggagaaagttgtaggctgggagcctaggcccatctctcttttcatatttttctgcctgcttattttctagccatgctgttagctgattagattgttcccacccagattaagggtgggcatggctttcccacccactgactcaaatgctaatctcctttggcagcaccctaacagacacacccaggatcaatcctttttatccttcaatccaatcaagttgacactcagtattactcatcacaagtccaccccttgtcaacttcaacccatatatatcttctgagatcatacataatcttcaaataaagacaataataaggtcataatgacacctaacataatacaactatcattcatacaaacagaaacacatcaatccccaacccaaatactgttacataaagttaacgatacttaaacgctgatgtgaagtcaataaatcttatgtcacatgataaaggagaaaggaaataacatgaagatattttcttaggacaaaggtatacacgcacaaacatgtttttaacaaaagaaggaggaaatactcatgacaattacactcctcgtttctgcagctggccatagctggtattgatgattactttcttctactatccattctgtattctgtattccctttgccttcagcaagcacctcagcaggtcgtggatatttttccagatggtgtgatccaaatcttcattcctgaagcatctggttcatttgtagtcctgcctggatagggctgttttagttttccatggaccttaatcacagggcatgataatactaagaaatgccctaatggatctcctgtattccatgcatactcttccttacctccgttatggagtagtaaactgatttcatcttgatagtctgtcccaaacaccccagccaacactgtaactcccttcttagcctgttgacttaaaggtaggaggagcccaaagtgtccaggtggcaatcttaacttccccagtttaatggaatcattgatgtgtctccaagtggcagtgttccttcctctggaactaaatcctctaagccagcagaacataatgtcgtgggaacaggaagcaaaaattttgctagtggatcactaggggtgatggtgagtgctgccacttccacttccaccccttgattcctagactcatgaatcctggctatgggagaaacagtgccatatattggatgctgactcagagcatacacgccttctggggaacttagccccagcactgcaaagtattgtcacctagttgacattgtaattgtgacttcaaaaggccattccattgttctatcaatccagctgcttcaggatgatgggaaacatggtaagaccagtgaattttatgagcatgagcccactgctgcacttctttatgaataaagtgagtgccctggcgagaacaatgctatgtggaataccaggatggtgaataaggcattccatgagtccacggaggatggtagtcttacaggcaaacccatatctggaataagtgtctatatcagtgaggacaaacctatgcccttctcataatggaagatttccaatataatcaaccttctaccagatagctggctgatcaccccaaggaatggtgccatatcaagggctcagtgttggtctttgctgctggcaaattgggcactcagcattagccatagctaggtcacccttggtgagtggagagccagttcgagttccaaaactgaagaacttggagtatgatgttcaagggcaggaagcatccagcacaggataaagatataggttgggagggtaggccagtctctcttttcacatttttctgtctgcttatactttagccatgctggcagctgattcgattgtgcccacacagattaagggtgggtctgcctttcccagcccacttactcaaatgttaatctctttcagcaacaccctgaaagacacacccaggatcaatactttgtatcctttaatccaatcaagttgacactcggtattaaccatcacaattaatgtcataggattagtactaattcttctttgaatgtctgatagaattcaactgtgaatctgtctggtcctggctttattttgttgattttttttaaattaccatttcaatcttgctgcttgttactggcctgttcagagtttctatatcttcttcatttaatttgggagggttgtatacattcagaaattgatccatctcctctgggttttctagtttatgtgcatagaggtaatcagagtagccttgaataatcttttatatttctgtggtatcagtattaatatcttctgtttcatttctatttgagcttatgtggatcttctcccttttcttggttaatcttgctaatggtctattaattttatttatcttttcaaagaaccagttttttgtttcatttgttttttgcattgctttttgtttcaattttatttagttctggtctaatcttcgttatttcttttcttctgctgggtttgggtttgccttgttcttgagtctccatttccatgaggtgtaaccttagattgtctatttgtgctctttcagactttgtgatgtacgtatttaatgctaaacattcctcatagcactgcttttgctgtatcccagaagttttgataggttgtattaagatttactacaactgcaaccttactattgaccaatagctttttaattcctgagagtgtgacctcatttatgcccaaaaacaactttatgattgcttttcatgcagtaggccatgattagagagggagtgcttgtggcctggaggtagggttctccaatttatcaaataaaaacattggagtgcagttaaatttgaattcggtaaaacaatgacaaagaattagtatgtgtatctcccacatgatattgttaaattgaaatacaaatttacctgggtgcgctgtagtttatctaccaactcctcacaggcttcgaggcttggaagaggcagtgttggggctggtctcctcttactgatgccaggtctatgagctgaacctcaaaggcagagtctctctaacacagctaccctccagtgagcatgttagttagcactaaatacaccatatacgatttccaatgaataacacctactcacttccctaattcttctttctattattctccaagtctgcagactcaggacctccccaggggttgctgcagccagagctctggatgagggacctcataagtctttcaaaaccagatgcaaggggactactcggtccccacacagtgaggtttaagccaggggtgcataagcaacatgtaagagacagaagagctcagtatggctcttatggctctccttctgtccagtgagaaaactccagggtccttttgatgctgaaggtgggtgggctgagagtaggaggagacccaccctgacagcccagagattccaggacaagacttggcagcctgaaaaggggccacactcttgagtggggaagaaggaggcaactctgctcacaggcgtgcatttctggtggcttcccctttaccaaactggactccctactctgatgtctatcagagaatctccctcagtgagaccaagatcccaggacattgctaaaaacagcagcatggaccagacaggtatgtcatggtacaggaattctttgcagagcaataaatacaactgcagcttaagaggggccctcatagtcataactttggtgaagaagaaaatagacaaaggcagggagaaactgaagggctcaataggtctgagactggggcagcactgggtgctataggcttgtccttgaggggctgcagataatgacagctgggaagccatcatctgttcactgctcactgggctcagcagctgtgtcctcacagggaaccagattcagccaacctggctttctccaccccacctgggaaatgtattccggtgactgtctggactgaggttctatgaaggggctaggagacaagaagagggagacaggctggtttgcataaagaaagcattgcacaccctttcctttcatctaaaactcattaatggaaactctggggccatccatagaagtctagctggtctcctaaatttgggagttatgaaggattcattcctgatcaatctacaggaagggccatcagcaggaggtggtcagagtgagggagaaactggcttccttgagagactcttcaacacaaccaccaactctggggcaaatggggtgacttgctataacagtcatcccaaactactcacaggaacctgagcctagtcccctcaccttattgcttctgattctggtccatgcctctgttttccctggaccccttgcccatgtctgagtccagagtggcagggatggttccatcccagtcaacatctacaaagaagtctacatctacagctactatgacttgaagcagagtccacagttgtacccaagagggcctcttcagctcccccaccccttcacacaggtgacctctactgtaggtctggttgagtggcccctggaccctggtgaacacaaggtatttattcctctctaacaccaggtatatagtggagcaggtctgggtgggtatagagcagagtgtctcttccaaatgtaatgcagtaagaccctggctacagaaaatcatttcacaaaactccacgccctttcatggtaaaaacacccaatgaactatgaatagaatgaaactacctcaacacagtaaagaccatctatgaaaatcccacagctagtgttggccgggctggtctccagctcctaacctcgagtgatccgccagcctcggcctcccgaggtgccgggattgcagacggagtctcgttcactcagtgctcaatgttgcccaggctggagtgcagtggcgtgatctcgtctagctacaacctccacctcccagccgcctgccttggcctcccaaagtgccgagagtacagcctctgcccggccgccaccccgtctgggaagtgaggagcgtctctgcctggccgcccatcgtctgggatgtgaggagcccctctgcccggctgcccagtctgggaagttaggagcgcctcttcccggccgccatcccatctaagaagtgaggagtgtctctgcccggcagcccatcgtctgagatgtgcagagcgcctctgccccaccgccccgtctgagatgtgaggagcgcctctgcccggccgcgaccccgtctgggaggtgaggagcgtctctgcccggccaccccgtctgagaagtgaggagcccctccgcccggcagccaccccttctgggaagtgaggagcatctccgcccagcagccgccccgtccgggagggaggtggggggccagcccccgcccagccagccgccccgtccgggagggaggtggggggtcagccccctgcccggccagccaccccgtccgggagggaggtgggggggcgcctctgcctggccgccccttctgggaagtgaggagcccctctgcctggccaccaccccgtctgggaggtgtacccaacagctcattgagaacgggccatgatgacaatggcggttttgtggaatagaaaagggggaaaggtggagaaaagatagagaaatcagattgttgctgtgtctgtgtagaaagtagacatgggagacttcattttgttgtgtactaagaaaaattcttctgccttgggatgctgttgatctatgaccttacccccaaccctgtgctctctgaaacatgtgctgtgtccactcagggttaaatggattaagggcagtgcaagatgtgctttgttaaacagatgcttgaaggcagcatgctcgttaagagtcatcaccactccctaatctcaagtacccagggacacaaacactgcggaaggccacagggtcctcggcctaggaaagccagagacctttgttcacttgtttatctgctgaccttccctccactattgtcctatgaccctgccaaatccccctctgcgagaaacacccaagaatgatcaataaaaaataaataaataaataaataaataacaaaaaaaaaaaaaaagaaaatcccacagctaacatcatatgcaatctgaaagaccaaagaggtttttgtaatatcaggaacaaagcaataatgcacactttcaccagttctattaaaagcagtattggaagacctggcaagagtaattaggcaagaaaaagaaataaacagaataaaaattagaaataaaaaataaaatctctgttttcagatgacataatgtcatatgtaaaatgcccttaaaagtcccacaaaaaattattagaatgattaaatgtattcagtaatgttttataatacataatcaccttgtaaaaacatctcatggctaggcatggtgactcatgcctgtaatcccagcactttgagaggttgaggtgggaggatttcttgggttcaagagttcaagaacagcctgggaaagaaagcaaggctctgtctctaagaaagcggtggggggtggggggaagagagaaagagagagaaagagagagaaaagaaagaaagaaaaagaaagagagagaaagaaagaaagaaaggaaagaaaaagaaagaaagaaagaaaatctgttataattctatacttaaataagcaaacaggaaacaactcaaaatgaaattaagaaaagaaatcaaattacaacatcattcgaaagagtaaaatacggctgggcacggtggctcatgcctgtaatcccagcattttgggaggttgatttgggggtatcacctgagattagaagttcaagagtagcctggtcaatatggtgaaaccctgtctctactaaaataaataaataaataaataaataaataaataaataaataaataaataaaatttaaaattagctaggtgtggtggcacatgtctgtaatcccacctgctcggggttgaggcacaagaatcactcgagtatggtaggcagaggttgcaatgagccaagatcctgccactgtactccagcctgggtaacagagtgagacaatgtctcaaataaacaaataaataaagataaacgagtaaaatacttaagaataatattaatcaaaatggtgaaagacttgtacattgaaaactataaaacattgcaaaaagaaattaatacacaaataaatggaaagaaatcctttgttcatttattggaaaactcaatattgttaagctaggcatacaaaccaaaaggaatctacagattcattgcattctctatcaaaattccaagttagtatggagatcattaaaaagtcaggaaacaaaagatgctagagaagatgtggagaaataggaatgcttttacactgttggtgggagtgtaaattagttcaaccattgtggaagacggtgtgatgattcctcaaggatctagaaccagatataccatttgacccagcaatcccattactgggtatatacccaaaggattataaatcattctactataaagacacatgcacatgtatgtttgttgcagcactagtcacaatagaaaagacttggaaccaacccaaatgcccatcaaggatagactggataaagaaaatggggcacatgtacaccacggaatactatgcagccataaaaagggatgggttcatgtcctttgcagggacatggctgaagctggaaaccatcattctcagcaaactaacacaggaacagaaaaccaaacactgcatgttctcacttataagtgggagttgaacaatgagaacacatggacacagggagggtaacatcacacaccggggcctcttggggatgggagctaggggagggatagcgttaggagaaatacctaatgtagatgatgggttgacaggtacagcaaatcaccatggcacgtgtatacctaggtaacaaacctgcacggtctgcacatatatcccagaacttaaagtatatattttttaaaaagtgcaagccaaacaaacaaacaaaaagaatagaaaaaaattaatcctaaaatttatatataatattgagagaatctaaatagtcaaaatcatcttgtaaaagaagaacagtgttggagatttcacaccgatttcaaaacatactacaaagctacactaatcaaagcagagtggtacatatagacagacatactgacaaataaaacagaactgagtgcctaaaaaaacctcttagttatacagtcaaataattttaaacaaagttgtcaagaccatttagtggaaaaggacagtctttttcacaaatactgttgagaaaactggatattcaccagcaatctggaaatggatgaaagacccaaatggaagagccaaaactgtcaaaatcttaaaagaaaacattagggagaaggttcataatatagggtttggaaatgacttcgttaatatgacaccaaaggcacagaaaaaaatagaaaaagaagaatatagataaattggattttatcaaattgtaaaacttatgggcatcaaaggacactatcaaccgagcaaacatttgaatcatagaataggaaagattgtcgcaaattttgcatctgataagagatgcagactatagaaagaactcctaccactcaagagtaactacaaaaatgaaaacaatctgaattatatgggcaaaaaacttgagttcgtattgagtagactccaaagaagatctacaaatgggcaataagcacatggaaagatgttcagcatcactaatcattaggccagtgaaaatcaaaccacaataatatacaactccacacccattaggatggcattaccaaaataatagaaaataacaagatctagcaaagacgtatagaaattataactgttatgcattgctggagggactataaaatgatgcacccattgtggaggtcttatggcatttccccaaaaaaattaaacgtagaattgccattttatcggaattttcagttctgggtatgtgcctcaaataattgaaagcaggatctcaaagagaaaattgtacacccttgttcatagcagcgtcgttcacaatagctaaaaggtggaggcagctcaagtgtcatctaatggataaacgggatacagtatacacacacaagggaatagtattcaaccttaaaaagaaagttctgctattctgaataatgccgcaataaacatacgtgtgcatgtgtctttatagcagcatgatttatagtcctttgggtatatacccagtaatgggatggctgggtcaaatggtatttctagttctagatccctgaggaattgccacactgacttccacaatggttgaactagtttacagtctcagtaaactattgcaagaacaaaaaaccaaatgccgcatattctcactcataggtgggaactgaacaatgagaacacatggacacaggaaggggaacatcacactctggggactgttgtggggtgggggtaggggatagggatagcattgggagatatacctaatgctagatgacgagttagtgggtgcagcgcaccagcatggcacatgtatacatatgtaactaacctgaacattgtgcacatgtaccttaaaacttaaagtataataataataaattaaaaaaaaaaaagttctgactcatgcgatggcattgatgaaccttaaagacatcacgccagcagaaataagctggcttcaaaaggacaaatattgtttgcttgcccttatatgaggtatctagagtagtcaaatccatacagacaagaagtagaatgaagttttccaggtgttaagttttggtttgggaagatgaaaaatttctggagataaatggtggtactgtggttgtacaacagtgttaatttacttaatgacactgaagtatacacttgaaaatggttaaaataatgaattttgcatttgaataatttaccactgtacaaaagaggaagatttatattcagtgtagtttctctaccaagaacaatcaaaacatacaggattgggagagtgtgcctgagtattaggacacccttccttttatgccagcctgcagcttcctaagaggccaatagagttggaagcgcctcattactggtgactcaaagtaatgtgagaaagtctgggagtgaccatgatgtaagtggtgggtgtctgacccagcccaggagcagccgcaaatgcagcagctgccaaaaagggggagatgaaactgatggcagcagtaacagcctctccagctggagtggggcatctgctcttgtgcaaaatggttcacagttgatacatttagcacagaatctcatcctgtctacctgtcatgatcaactacaatttttattgcaaagtatgccatcagagtggcatattttatccagcagcaagcaaacatgaaggaagtttcccttagtgctttggtcaaactggcatggcagtcctgaacactgaatgaatatccaaagacaaggttctccaaagataaagatattatactatttattgataaatactgggagtgcatgatgaccattcagacacctgggaaaatgacttggctgaataacattgttaaaacaatgagtaaaaaaagagatgtgctcttggtaaaggaacacctggatccagggtataaagaccggaaagaagactaccgcagatttggacttttggatcaggacttggtaacattgaccctgtttacgacaaccaaaaacaaagcagtgctgtgtctacagtgggaatctgagtcaggaaactgcagcaggaacagcagaaaaaaggaagaggagctcagtgcaaacagaaggatggggagaccacagggaccaccaagaaggcccagagtgactttttgttttccgctcagggctgtcctcctcacaccccttggatcacacatttaatgaagacggctactggtatagtctaacttagcctgatcctcacacggttggtcctcagaagcttgaaattaactgctgggcaggaaaacctattcctggagacctctacagtgactgcttctatgaacaggttttgttagatcaacatgattaagctccccagttagagatctccagtgactggctggctgactgtggttggaaagaaggtctactttatggtgcagacctctcatgggatacggaaagggtcctggtactttgaaatcaccatgaatgagatgccaccagacaccactgccagactgggttgatctcagccctaaggtaactatgaagctcccttaggttatgataaatttagttattattggcagagcaaaagggaatcaatttccaccagtccactggcgaacactactgttttagctatgggcagggagacatcctacgattttatattaatcttcctgaaaacccaagagacagccaagttaccaagataaggctttgataaagttcaacaattatttttattttgtggaaaaagactttgtggctaaagcagggaagagtctaaaacagattccatatagtaaaataatattttataaacatggtgtcaatcaagatgtggcttcaaaagatatttttagggggttacttttagccatctcactggacaagagcttcatagtttccattaactttggactgtgctccaagtatcctccaaagaatctcacttactgccctgtgagtgacatgggctgggatgctgtggtagagcacactctggctgatgtcttgtattttctggagacaaaagaggatgggggcacagtcctccatgggaaccctgaacaggtccttctttcttttcagatatggactttctggggaataatattgggtggcttttgttgttgttattgtttttgaactgtcttaaatgttctcccaaagatgctacagaacatagcctatccatttaccaagttaaaaggctgagtaggactgtgagagatgccctgctcatcatcattcttcttccacttccagtgactgctcttatattctttgccataagccaacaaccgctcatcccaagatctcataatccctctgtaaaactgatgctgtactacataccttgccagctgggacttgtaatcttactgtattttctaaggagtgaataatcttgtccaggtaactaacatatttaaagacattttcttctgtggacactgactccatgccacctgttttccaaagaagtggtgaagctgtttctgagaacacctaaaatcaatggttgtacattccaaaccaatctaaaagtgatttccttttgctgtgggtttggttctattactgatttggaaatatacctttgaacactgagatctctgaaactactagacttctagaagtgtaattgtataagaagtctgtttgcagctttaacaaaatgagaaactcttcccaaattaaagctttctttgaagttaaaaaaaaaagaataatgtgagattggaacctgtgaggtctgaggattcccaagagtactctcaattctgacgctaattgtaacctaagggctccccaacagcccttcacttcttatgattccctagaaaaactcacataactccctgaaacctgtgacatttattgatacaaatttttacagcaaaataatacagattaagataattcaagggaagaggcacatgggcagagttcaggagaattccaagcacaagcacccagttgtcctctcccagtggagaaatagacagtgcttcattttgctcacagcaatgtgtgattctgtgtatgaaacacctatttcctgggtgagccaaccaggaaagctcacccaagcttggtgtccagagggcttttaaggggtggtctgggtgagagtggggttattatgtagaccttgtggatcatcctcaaggctcacttcagtttccattgaattaacaataaaacttaaaccttcaatctttggttattttctttttaaaaattctctgaagtaaattattattaaaattctcacttaagacagctgtttatccaatatgaggctcaatataaacagtttcaaaaagtcagtaggtcattaaaacaatttcttcagtcattcaaaccattcagataaaaattaacaccatgtaatacaaaaattgaattatagtcacagggacaggatttcagcaatggcaagaaaaagtagtgcaaataggaatgagcaaagaatagacaagtaatgggtgtgaattggcctcggaaataccatggtaatgtcaaaaagataaatcaattgttattttgttaaataagtgaaaggccaggcattctcagtccaggaaagccatcacagggcagtctgagtcttctgcatcttaagaagctcaagaggttcaaacttaataaaccctgcacagttgctcactggttcatgtaaaatgctagagcagttgcttcctcccactcagcaaatccacagcacacagtcaccctggtctggcccttcacagtgtagatgccctcagggctaagaacctgagtggttctaaaagtagtaaagatttgcataaagtaccacacaacacaccctctccacatagggagctcagtaggacataaagagccatcagaatccagccccgactctggagccaggagtcccttctaatatcagcatcatggcctggactcctctccttctccttctccccatgtacctcctcacttgctgcccaggttaatagagatttcaaataccagcctttggagggattcctgtgtctccctttctaattcccaacatgtgtctgttttttgtttcagggtcaaattctcaggctgtgatgactcaggaaccctcactgactgtgtccccaggagggacagtcactctcacctatggctccagcactggagcagtcaatgggggtcattatccttactggttccagcagaagcttggccaagcccccaggacactgatttatcatgcaagcaacaaacactcctggacccctgcccagttctcaggctcagtccttgggagcaaagctgcccagacactcttgggtgtgcagcccgagaggtgaagctgagtactactgcttactgcaccatagtcgtgcttggcacagtgacagactcagaagaggaaccgagacataaacctctctaggcccttgtgatatgaagatcatatgatcacgcacaccagctctcaaggcagcctacatgtggaccagccatagaaaggggaaggaaaggatctgaattgattcctatccctgcttaagccctgaagtgaaggaaatgtgagaatgatctgggaagaactggatcaaaaaaaaaatcagaagtttattgctttgtattctaaaaggagcactaacagctggatcagatctaaaggctgaggctaaatgcatttcctccagaaagaagcatcttcaaagtatggggtttctgagctaagagtaaagagaagaaactctacttttgtatatttctaaagtttgttttattgagttactttcaaagcaatacatgcctattatgtggaatcagaaagtattaaaaatcaccaagttctctgcaaagctaccttatcccagataatcaatagaagtacatttcttcatttggatgcattctctcatttttgttgtcaatattttcacaatggttatcaaaccttgtgctcattcctctggttttatacagctttttgctctgtcatttaatgttaatgtaagtagttttccatttatttgaaagggtaaaatatttgagtagttgctaattttatttttatttgaataccaatgaaaaattataatttggggtaattcaaattgcttgtcagacaaagatgtgacattgggctattattaaaatgctcctggtcttctctgtggatttagtgaagtcaaacaaaatgcctgcaattttctatggaaagccttgagtacattatgcctgacttcacaatgcagaaaatagagaaacaagaatttcctgctcatgtttgctggagcataatagattcaggtacgaggaacaacttatattgaaaactacgtcaatgtctccatgcatgtgttagaacagtacttcccaaactctattgtgcatacaaattatctggggattttataaaatgcagattcttattcagtgggtctggagtgaggacacaatctctgcatttctcacatgtgcctgccacacaaaatccacatatatatttgaataataacaagtccagccagcagtggaggctcatatgtgtaatcttagcactttgggaagctgaggcaaaaagattactcgaagccaggagtttgaaaccagccaagagcaacatagcaagatattttctctatagttttttttaaataataaaaaatgaattagccaggcatagtgctgtatgcttgtagccctaagtactaaggaggctgaggcaggaggagagcttcagcccaggagttcaaacctgcagtgagctatgatcatgccactgcacttgagcctgggtaacagagtgagaccttgtctctaataataataagaaaaacgacaacatatccataagactagtatcaaataaggagaatccttggcaggcaagaacctaggagaaatctctgacatagggaatttaccagcttgcatgatagaagaaccccacactccatggagggagatgaccagggaggacagctgcaaagctaggaaaggctcccctttctttgagagcaaaaacaaaagcaaacaaacaacaaacctgaccttccctctggctcctgtccaacactcttactggctcctccttcagcctttcctataatgtggcccatccttaccctctccccttccacatctctgattcctgaattcccttctttgttctctttccctttgctaccacccacttctcccctctaatctcttgagttaattatcaagggctttataacaggaaactcattggcattttttctgcatctgtccttgaagttgacactcatacttttatctctttcttgaacctctcagatatgcttagaactgaagaagcccgaagttgattgattctgttttttcacctcagccagcaccttcttcttctcctttccaggagaatctgtatttctctgtatttccagaattctctgtatttccagtgaatctgtcagacacagtaagtactcttcaaaggtttaatttctgacttcattgttctttgttctcgagatgaacttccttgtcccttctcctaagctacctgctctgtaaacaacttctcccaccagtcccaatctgtaactcacatctcctccttatttagaaagagtcctcttttactccttgctacccattctgtaaactgcccctcccacaaaactacccttcccacatttgccatgccctgacatgcccaaacataccttgtaccataatggactgcctctcccttcccacctaattagccatactcaattttaaacagtagccaatcaggtcagtttagattgtgtggtccaactccagccaatggggacaggacacagaagcagggactaaccacgttagggatgaaaaccccttccctcctttgtttggtgtgctcttgcagtggtcagaagtgcaagcggcactcttctgtagaaataagtttgccttgctgagaaatattttgtctgagtgctcattttccttgcgactctgagctcttgtttctaacaaaatagggggtcatctgggattcccattctcctctgaggaagggcctctgatcacctcttaggaggagatgcatcccactgcttcattgcagtggcctcaggggtaaggaatcaggacccacccagcatgataaataaacccagactctcagcaacacaggaagaaaaggcctacagttaccgtggcgaccaggtaactgtgcacagacaaaggtaagaaaaaccactagggcagtgaagtacttccttagtggtcaggacattctgcaggttgaaaatgtgtgaatgagatgcacaattaagtgcaaagtgagtgtggagtaaagtaaagggtgcaagaaatctctagtaagagaggttgagccccagggaaatggtgcaagaaatctctagtaggagaggttgagccccacgcacactcagcagggaaaggagagcgagaaacctccagtagcggggattgagcctccagggaaaagggtgcaagaaatctttaatacgagagattgagcccccattaacctccaagacgggagtgcaagaaatctctaatatgagagatatgagcccccattaacttccaggatatgaaataccctagtaaaacaagaactacaaagggcaaaggagataacacaattccctctgatagccttctaggtctcatgttaaaatattggagggataatgaaaggactaaacacaagaaaaagcaacaaatgatcaaatatgggaattgttttatttggaccaaagaacctattctcaaaccttcagttttctggccaaggtttggatcaaatgagagttggatttgtcaacttttaatagagtatgtaaatgacaaaagtcctgcttcccaagaggaaatagactctgctgtgtcttggtggcaggggccggtcctcctctacccccttaaaactagtaaggataagccagaaactaattcccctgtaggaactaaggccccacccctgagcaatccatgtgggatcccttagaccatctgcctccaccagatacccctaacttctctcaagcagccacccagacccttcccctgctcacattatgccctccctccttataatcctgactgttagggctgtccccaacctgaacgccctcctgcaagaaggcttcaacgtgagatagagcaatgtaaaaaggatattcaaaacttccctttcccctcctcctcaaaagagtctgccccaatcgtttttcccttaagggaagtgtttctaggaggagagggagttggctttgtaaatgtccccttaactagttcagaggtcagaaacctgagggaagaacttaaaccactattagattatccttttggggtcgtggatcaaattgaccaatttgtaggatcacaagtatacacttaggctgagctaatgtccatcttaagtgttctctttccgggggaggaaagaaccatgatacagaaggctactatgatagcctgggagtgcaaatatcctcccagtcaaaatacccctgcagcagaacaaaaatttctggcccaaaacccccaatgggataataacaatgcagccaactgagaaaacatgaaagaccttagggaaaaggtagttaaagggattcaggaatcagtgcctcaaacccaaaatatttcctgagcatttaatatacagcagggaaaagaccagggagccatggagtttttaaacagactcaaggaacagatgagaaaataggcaggcttaaacataaaggatccccttaggcagggatgttaaaactccattttgttactaatagttggccagatatcatgaagaaattacagaaaatagagacctggaaatatcggcctatagagggaacaagagggcagggagaggagagagaaagactgacagagggaacggagggagccagggagagagggggggagatacaaaggcagaaagagagagagggagggagagacagagaggcagatagatggagaggcagagagacagtgaggaaaagtcagagacccagacagagagggagagaaagagaggcagagggagagaaagaggacgaaacaaatgtttcaaatgtgaaaaaataggtcacttcaaaagagaatgtcctgaatgggaaaaagaaacaaaagtcatatataaaagcagatcagctaatattaaatttctgttaattccagaggcaggaacatatctattagggagagatttaatgctaaaatttggcttaggcctttatattaatcagggaaaatttctcatctccttaaacctactcaccaccacggatgaagagcgtatccatcctgacacatggtcaaaagaagaaaattgggggaaattacagttcctccaatcaagcccaaattaaaaactcctggggaggtagtaaaaaaccaaaatctttcttttgaaagctgagggaataacctcacagaccaaatagccaaacaagctgccatttcctctgaaacgcccatgtttcacctcaccccttgcctttctcccccaaccgccattgccatcttctcccctgctgaaaaggagaaattaataagaataggaaccaaggaaaactcagaagggaaatgggtgttaccagatcaaagagaaatgctatccaaacctctcatgagggaggttttatctcagctgcatcaaggaacccactggagacctcaagctatgtgtgatgcagttcttagagactatggatgtataggaatttatactctagcaaaacaagctacagatagttgtttaatatgcaaaaaaactaataagcaaaccctaagaaaaccatcctttggaggaagaaacccaggaaattaaggccattccaaagcatccagatagattacaccaaaatggcctcaataggtcacctaaagtatctaccagtaatagtggatcaccttactcgctgggtagaagctattcccttttcaagtgtagccaccagtaatgtagtttagacattaactgaaaatattatacctaggtttggattaatagaaaatattgattcagataatggaaactatttccctgcacatgtcattaaaaagctagcccaagtattacaaataagatgggaataccatatccctggcacccacctttatcagaaagagtagaaagaatgaaccaaatcctaaaaagccacctaatcaaactagttttagagactcgactaccttcctattgcctaattgagggtccgaactgcccctcggaaagatattggcttatctccttaagaaatgctatacgggttgccttatttacactccactgctgacattcctacatttgaaactaaagatcaatttctcaagaactatataattggtctgtcttccactttctcttccctcagaactaaagaccttttagcactgacaccacccttggagctcccagcacatcagcatcagcctgggatcacattctcatcaaaagctggaaagaaggaaaactcgaaccggcttgggaaggacactatctagtgcttctaactacagaaattgctgtccgcacagctgaaaggggatggacaccccacacacaagtgaaaggagtgattttcacagcgagagaaaaatgggccgtcaccccagggcccacccgcaccaaattaaaaagggctgaataatcatttgtttattttcccttttctttccaacagaaagtcacctcatcatcagtgtgcctcaaactaatcgtcccttaaccctccagttcgatgcttgttcagtcacctcatgtagagatgaacgagctcaaaggcagctatcaaatgtagataagtatctgtgtccgtaccgtagtgagtcaaccaagtataagtatagagccttaaaaagtccctgtggtgactggacagatgtttggtggaccacccaatatggagggtggacagccaggccccctttttcaaacaattctgaggactgaaacagaaactccaacttattcgtggtaccaccccaccaaattgtaagtcattgcagtgtaaccccttattgctaattatagataatccccaaacaatgacccaagaaccctccatattcgaatgatatgggttaggagcagatgttacaggacaggaccccataggaatcttctttctgaggttggctagaccatcagttaaaaacaataaagaaatccagacccagagtccagggaacctatgggagccaatgctctccccaaacatatcaggctcagcattctcttctcatctccagaatgacccaactaaggtaatggttgtggaggtaaaagatttaaagcagactacagctctagagacagggtacaaagacgcaaatgcctggctggaatggattaaatctcctgtccacactctaaacaaaagcaattgttacacttgtgcacatggcaggccagaggccctgattgtcccctttccacttggaaggtcctccagccaaccaggcatgaactgtatggtagctgtcttccaacaccccacagcctggggtaatgaattatgctgaactctctctctgctatttcctgaagtccagcaccctgtgggtcagcccctgagggccatccagcttctgtctcctgatgcaagtttcaccccatgtctctcacgacaaggggaaaacttagcatttcttggagacctaaagggatgcagtgagcttaagccattccaagagctgatcaatcagtctgccctgatccatccctgagcagatgtatggtggtattgctgcggaccattactagacacttccaagtaactggagtggcacttgcactctgatctaattggccatccctttcactctgacattttgtcaaccaaaaaggataaagacaaagcatcataaaacaaaagatgctcctcatgggtcctttgactctcatgcttatatagatgtcattggagtccagagaggagtgccagatgaatctaagccccaaaatcagatagttgcagggtttgagtccatactattctggtggttgactgtaaataaaaatgtatattggataaattacatctattacaaccagcaaggatttgttaactatactagagatgctattaaaaggatagctaaacagttaggacccaccagccaaatggtttgggaaaatagaatagcattagacatgatactagcagagaaaggtggagtctgtgttatgagtggaactcaatgttgtacttttatacctagtaatactgctcctgatggaaccataacaaaagcattacaaggtcttactgctttatccaatgaagtagctaaaaattcaggaataaacgatcccttcactaatttaatggagaaatggttcagcaaatggaaaagacttatgtcctcaatctttacttctcttgacattgtaataggtttgcttattcttgtagaatgttgtatcataccctgcacctgaggcctactacaaaggcttattgaaacaactctcactaaaacctttttcaaatccaccgcccccccaccttattcagataagctcctacttttagaaaaccaagcagaacaacagagtcaaggcatgttaaaaaggtttgaagaggaagaattataaaaatcaaaagggggaaactgtcagatacagtaagttcctcttaaaaggcttaatttctgaattccttgttctttcttcctgagatcaacttccttgtcccttctcctaagctacctgctctgtaaacaacttctcccaccagtcccaatctgtaactcacatctcttccttatttggaaagagtcctcttttactcctggctacccattctgtaaactaaccctcccacgaaactacccttcccgcctttgccacaccctgacttgcccaaacgtaccttgtaccataacagacagcctctcccttcccacctaattagccatattcaattttaaatagtagccaatcgggtcagtgtagattgtgcagtacaactccagccaatggggacaggacacagaagcagggactaaccacattagggatgaaaaccccttccctccttcatttggtgtgctctcgcagcagccagaggtgtgagtggcacccttctgcagaagtaaatttgccttgccgagaaatcctgtttgagtgctcattttccttgtgactctgagctcttgtttctaacaaatccagtgaaccacacaaatatactagccaattttctccaatccccaccattctgccttatgtgctgatctagtgaggaatcaaataggaagagagacccatggatttctatgcagcctgggaagtgagttcatggatgcactcagttgtaacaccagacacctgtctgccgtttgctgtttagcattcacagggcccagcagctgtgtcctcccagggtgcctggagcatcactgaccacaccctcctacctcccacccacctactcctcaaaaagaaaaatcagactcggcatcttatgtgaggggcacagccaggggtcaggatagatttccactgagtcccctcccctaagagacaccagggaagaggggttgttccgcctaatctatgtggctcaggaagcagagcactacagacatctctaccatggcctggaccctctcttcctcaccctcctgagtctctgcaaaggtggctgtgacatgactctgatgactggagaaacaccagggtcctttgtctcacactgagaaaattagtgacatggacacacattgagtggttttaaggaacagaaagtttaataggcaagaaagaagaaaacagctcccccatacagagggaggagggatcctaatggaaaatcccacatgcaatggaaaacagctgattatattgggaggctggaggaggcagtgtctgatttgcaaagggcccaggggattggtttgaccaggtgtgacattcatgcagcctgtaaaaaaaactggccctcccaccttagccttttaatatgcaaatgcaggtcaccatgatgtcctgcacatgtggcttttatctggaggctgccatgacacctggcacacgtggtgacaaaaagaggagggcgaaagccaccatattgggtggacctggcttctagccaccagcatttgcatatcagtgcttgccagtctggtttttcaagctgctttctgttagcaaagaaatggtttgggggtcgctttttattaaaggaaaattccaccgagaacttacaccatttctagctgcctaaaaattatttcttaatgactcctgttatttcccccctcaggagaagtaaacctaactgtcgttaggggatgttggacaacaattctttctggctacttccttctggaaaggggcgtcatgtaaggggacagcagttgggcctcctcctgaggttgatctaaggattctctgaagaatggcatgtccatgtgtggctctgtctgcagcattatttggagtttgattgcttctaggtgaaaagagataaatcttacaagaaggtttaaaatatagggttagaatatgagtattaagattaccactgttagtgggggtactatagaccacaactatgacagcagagtttgatacttgttagttacaccagtggattgtaatactgggttgtctccactagatgtcactgaatattaccagaaagattaatatgaaagtgacatttttccttgagaaaaccatacatttccccctttacttgccattagtgaatagttttaggcttagaccatttttataacttgcaatataattgggagaaatacattattgggtggctaaattaactttagtgttaatcttgacaattccttttctttaattattaaattatttcatgactttcacagaccctcttacaacatactcaaactttccgacttgtcctaaacatccttcctttaaataaccagtcatttgcttttaggacaagaatttcccacacaagatcttttcttatataaagttccttcttttataaccttctttctatagcttagagtgcaccatacaaccagtcttcaataaaaagtcctatcaaacttaatgatagtaaaactttcatgctatatccataactattactcctgctataagcaaaacagccttgactaaatctttcctgcaattgttaatcctgttataaggatgataattagacaagatgttacagcaattagaattttacaaccagaattccacattgtgagtgccatagtgtatagttctattgcaaatagtagtgtgactgtaacaattcccacaagactggcatagtaaataatttccattgaaaactttacttgccaagatataacatttccctttgggaatctacaaggttacaaatgcaattctatgaataatcaaaatctccctgcgaatatgcattaaaaagaagttctaatatttggtggcaaatttttagaggaaggggtacaaataataaaaagtggccgggcatggtggctcacacctgcaatcccagcgccttgggaggctgaggtgggcagatcacgaggtcaagagactgagaccatcctggccaacatggtgaaaccccatccctactaaaaatacaaaaaaattttgggaggctgagacaggtggattatgaggtcaggagatcgagaccgcctgtagtcccagctgctcgggaggatgaggcaggaaaatggcatgaacctgggaggcagagcttgcagtgagctgagatcgcgccactgcactccagcctgggcgacagagcaagcctccatctcaaaaaaaaaaaataaaataaatagctgggtgtggtggtgcatgcctgtaatcccagctactagggaggatgaggcagaagaatcacttgaacccgggaggcagaagttgcagtgagctgagatcatgccattgtactccagcctggtgacagagcaagactctgtctcaaaaataataaataaataaaaagcatctggtgaggtaggagtgggactgagtaggatgagtagccctcactcagttacttatcttttatgattttcagcttaagatcttctatttctccactttgatattcaggacgttcctctgggctgtcaggggttgctccctcaggcattcaggctttgacttgagtgtgatgtattcagaagttgacacctgtaacttttgctgccaagggggttgaaagagaacagtgtagggcccttcgcagcttggcttagggaaggagagagaggtgagagttttcactagtaccaaatttcctgggttaaataaaggtggttctatttcctggggctgggcttctgccagttgtgtcaatttctgttggaagtgaggtagagaggttacatgcttaaccaatttataggttttctgcctgaaaacagtctctgagcacattgacaaattttatcctttcctaagtgaaaagcttggtgaaggattttaagaactttccattggctggaggctggcaaatggagtttgccatcctctggctgtagccatcctgagagataaaaagcatacccttgagaagtggcctattctgtttctgcaggaaaatactgaggtttaatttctgttatggagcattcctagattagaagggggcttgaagtgtgttaatgccttgaggcttccttgcctttgacttagctgcctgattaatctatttcctttggctactttatttgctgccttttggtgttcctataatgtatccctgctatttctcacggcataaaaagtgaagataatagcctgctaattttctggtgatattttacaggaaatccattagtggtaagaggatgtctttccttttaaatggcagcatgagtatggagagctaagaaagcatacttggagtccgtgtaaatgttggctacctttcccttgcttaattgaagtgttctcgtaagagctattagttcagctaattaagtgcttgtgtctggggagagatgttgtttagagtgactactgcttatcctgccttatgtatttcttgctttaccggctgttagttaaaagcgccccctaaaggacagtaatcctgccacattacgtggggtgtaaacagttaagttctttcccaggattaatttggaggcttttctaactgtaaagctatcatgacaatggcttggaagcatgtgtaaataggtcctcctaactgcaactaaggttgagaaaaatattgtactagagtttttcctgagatgttccttatggtgatgctatgagaagaggggaggcctggattagagagaagaaaagagagagattggctttagtatttagaaggacatctactttccttcaatttccagaatcacccaggtcctggcaccctgttaaatgtgccacccatgtttgcaagcgtgaccctccaagccatggcaccagaggaactaagcttgtgggcctagtcgtgctaccccaagcagctctagtcctctgcctatgatttccctttgacttcctagacttgtgtgatctgtgtgtctcaccccacccccacccccaaaaaaatagatcttggcagaaactatatggaaggaaaggctcctttaatggagggaatgtgctagattgcctgctattatggcctgtgctaaagcatttacccttagaaaaatggttccagttaacttccagacttaaaatctccttactaattaagtactgttttaatcggagagagaacaggtgtcttaaaggaacgcggggacctaatggcgactttcctgctaatgggacagtatcggggcacaaattcggctgcagaggaattttactcctaatagttaaaagcagaattttcccgttcacaggagcagcataaatcctggtttccagtagaaaggtgcaaaaagaaaaaaattgagaagctgcggtgtaccgcggagatcagcaatgtgtcgcataaagaggattttatttccactaggtggcgctgttggcctagaaataccatgtgctcaccagaggaattttagggagtaacctcactgaggggcaaaggaagacttctgttcctagaagattgcaatggcattttcctgagctatctccccagttactacagcattttctgatcttgcctaccaggattacttccctacgctgtaaaaattcccgcacatttgacacacagagagagtaagagacataacgaccacggataaaaaaggaagaaggttctgcgacaggatagctagggatcctttaccaacatccagagcaggccgttggaggctgggtccagtcccgaaacctttgaataacaccaggctgtgccctggccagaaattctcagttgcttcagaacttttcccagcctcacgcgatggctaagtttccccatgaaaagaaactgatttgaagcatgaccaacattcccaaagacccgtgagtattgcgggttctccgtgttctgaccagcaagcctaacactcaagtctttagaacaacagccatgataagcgtatttagacggccaatggatgcccataattgatttgattttgattttaaaatagagaccaagaacctctgaatgacagaacagactttgagttcactcctctaatcactacgtcgatgaatgttgtaccttggattcccagtgaaggcaccagaaaggatacggctctgatgactggagaaacaccagggtcttttgtctcattctgagaaaattagcaacatggatggacatatgtggagtggttttaaggagtggaaagtttaacaggcaagagagaagaaaaacagctcccccatagagagggagaagggctccgaacggaaaaccctacatgtggtggacagcagctggttatattgggaggctggaggaggcagtgtctgatttgcacagggcccagggaatgagtttgaccaggtgtgtcattcacgcagcctgtaaaaaaactggccctcccaccctagccttttaatatgaaaattcaggttgccatgatgtcctgcacatgtggcttttatgtggaagctgccgtgacacctggcacatgtggtgacaaggagaagagggcgaaagccaccatattgggtggacctggcttctagccaccagcatttgcgtatcaatgcttgccagtctggtttttcaagccgctttctgttagcaaagaaatggtttgggggtcgctttttattaaaagaaaattccaccaagaactttcaccctttcttgctgcctaaaaattatttattaataactcctgtagtagctggagacaaggaggcagggatggcactgggaggaccagggctcttccttgctcccctggcttactgagccacctccctcaccctgtgtctctctcctgactctcagggtcctgggcagtcagaactcacttggtaacctgcacagtctgtctgtggctaaaccagtcaccatctcctgcactggaagcagcagcaataagggtcttgggattgtgtcctggtaccaacaatgaacaggaagtgtccccaaacctctgatccatagaagccaatatacacttttagggatgtaggactgattctcaagctatcagttttccaaaaaggccttcctgagcatctctgggctccaggatgagaacaaggctgatcactaatgttggcattagtgatcatgtttgtgatttgctataaaatcatccagcgatggagtaagatgatgggtaaaaagggttgaaagattaaacaagatgagtcacactgatgatgtcaaagctagctgatgggtgccaaggattcattagacaactctcagcatatttatataactcaaaaatttccataataatcactgcctaaaaaaatccatgtctgtgatgagaggtatatgtcctgcttttaattggtatgtaacctgattttaacaatgtggtatataatctgcttttaacaacgtggacaaaatgtaagcttacattctgacttcaagttgaagcccatcttctcctaacaggcaaaggaggagctggggtggaggctatgaaagggaccggagctcagcgtttcccaggacaaagaagtgagtgaggccggagtcccagcagaaggacgaggggctgtgagatgggctatgggagtgtgcaggggccacaacgtgcaggtcatgctgctggggccacaggattcaggttttatataaacaacaaggagccactgaaggtgtttaagccagggagtgacatgccacatctgaatgagaagcatctctctgaattccttgaggagacagtgtctgaaggaagtgagtgacctgattctagattatttactaaagcaccttgtaagtctagaaatccaggggccatttacaattagcacaagtgtagatgtgggctacattgaagaagtgatggtctcttgtcattcttcacagaactagaaaaaacaatcctaaaattcatatggaaccaaaaaagagcccacatagccaaagcaagactaagcaaaaagaacaaatctggaggcatcacactacctgatttcaaactatactataaggtcatagtcactaaaacagcatgacactggtataaaaataggcacatagaccaatggaagagaacagagaatccagaaataaacccaaatacttacagccaagtgatatccaacaaagcaaacaaaaatatagagtgggaaaatgacaccctattcaacaaatggcgctgggataattggcaagctagatgtaggagaatgaaactggatcctcatctctcaccttatacaaaaatcaactcaagatggatcaaggacttaaatataaaatctgaaactataaaacttatagaaaataacatcagaaaaactcttctagacattggcttaggcaaggatttcatgaccaagaacccaaaagcatatgcaacaaaaacaaagttcaataggtggaacttaattaaactaaagagctaaagaaaaaaaagagcttaattaaactaaagagctaaagaactaaagaaatcaaaataatcacttatagaatgatgaaatcggtgtctgggaatcagaacatggatgtgtgaatacagacagtgactggtgagctgcatggcaaaaggaacatcagcagagtaaacagacaacctacagagtggggaaaattcttcacattctatacatctgacaaaggactgatatatccagaatctacaaagaactcaaacaaactagaaagaaaaaaaaaactcatcaaaaagtgggctaaaggcatgagtagataattctcaaaagatgatatacaaatggccaagaaacatatgaaaaaatgctcaacatcactaatgatcagggaaattcaaatcaaaaccacaatgagataccaccttaccacctgcaagaatggccataattaacatataatagatgatggcatagatgcagtgaaaaaggaacacctctacactgctggtgggaatgtaaactagtacaaccactgtggaaagcagtgtggagatttttttaagatctaaacatagaactaccatttgatccagcaatcccactactgggtatctacccagaggaaaagaagtcattatacaaaaaagatatttgcacacacgtttatagcagcacaattcacaactgcaaaaatgtggaagcaaccaaaatgcccacaactcaatgagtgaataaagaaacaatatatatatgatgatatactactcagccattaaaaggaatgaattaatggcattagtagcaacctggatgggattggagacttattctaaatgaagtaactcaagaatgggaaaacattgcatgttctcactcagaagtgggagctggccaggagtggtggctcaagcctgtaatcccagcactttgggaggccgaggcgggtggatcacaaggtcaggagatcaagaccatcctggctagtgtagtgaaaccctgtctctactaaaaacacaaaaaaattagctggccatggtggtgggtgcctgtagtcccagctactcaggaggctgaggcaggagaatggtgtgaacctgggaggtggagctttcagtgggctgatatcatgccattgcactgcagcctgggtgacagagtgagactccatctaaaaaaaaaaaaagaagtaggagctaagctatgagaatgcaaaggcagaagtgttacgggaagtcagggaccccaaagggagggaccggctgaagccatggcagaagaacataaatcgtgaagatttcatggacattcattagttccccaaattaatacttttataatttcttacgcctgtctttactgcagtctctgaacataaactgtgaagatttcatggacatttatcacttccccaatcaatactcttgtgatttcctatgcctgtctttactttaatctcttaatcccatcatctttgtaagctgaggatgtgtgttgcctcaggaccctgtgatgattgtgttaactgcaaaaattgtttaaacaacactaaatctgggcaccttgaaaaaagaacaggataacagtgatgttcagggacaagggagataaccattaggtctggctgcctgagagccatgtggaacagagccatacttctcttctttcaaaagcaaataggagaaatatcgctgaattatttttctcagcaaggaacagccctgagaaagagaatgtgttcctaggggtaggtctctgaaatgaccgctctaggaatgtctgtcttttacagttgtagataagggatgaaataagccctggtctcctgcagcgctcccaggcttattaggatgaggaaattcccgcctaataaattttggtcagactagttgtcttttctcaaaccctgtctcctgataagatgttatcaatgacaatgcgtgcccgaaacttcattagcaattttaatttcactccggtcctgtgatctcgccctgcctccatttgccttgtaatattttattaccttgcgaagcatgtgacctctgtgacccacaccctattcatacactccctcccctttgaaaatcactaataaaaacttgctggttttgcagcttggggggcatcatggaacctgccgacatgtgatgtctcccccagacacccaactttaaaatttctctccttccctttatttctcagaccggccaacacttagggaaaatagaaaagaacccacactgaattatcgggggcgggttcccctgataagaagaatgacacaatggactttggggactcaggaggaaagggtgggaaggagggaaagtggtaaaaactataaattgggtacaatgtatactgctcgggtgatgggttcagcaaaagctcacaaatcaccactaaagaacatactcatgtaaccaaatatcacctgttgatattactcctatcaacattactcctacctgtgtctgtgtatctttgtcatgtgacttatcccccttgactttgtgcttggccctgttctcactttgagtaatggaacatttgtggaccttatgcaagctcaagtttaaatgtccttgcaccacttggtttgccctcttttgcaactctcattactaagatcttgtcctggatagtttttggcccttcaggctgggtttccaaataaacacgtgtgagtaataaatgctgatatttgtgactgttacatagcaatatatgaatgatacatctaacataaagcagacactggatattggtgtggtgagtgaaaacactcaggcttgtatgtatgtagattcctctcccacagagggcagtcatcaatattaccaactcaactaagaggatgattcttatttggtgcagtttctctaattccaagagcagtggagaagtctaataccagggcagtgagcacgaccatctgaacaactcttccttttatgctggccctgacgcatcctaacaggccaagaaacttggaagtgcctccctggaggcagctgggagagtgatgacagatcgggctacgtgggtgatttatttatattcttctattgtctaagatggatatgtttatttaaaattggaaataactgctataattaaagcattgaataaaactaaaattaagaattaaaaatttatatattctccaacatcctatcagtcaaagaaaattacaggtgggtattaaattgtcagataaaagaagaactttcagagcaaaggaaagaaatgaatatttataatctccaagcattgcatgtatattttctctaattctaccatttggctacattttaaggtgccctaaaatttgctttttttttttaaattttctttcgctttccaattctatctcattatcacccatgaagtcccatctttatttttttaacaacaaaatattaggagaaaattaatcatcatttaatccatttatttttatttatttatttttgagatggggtcttgctctgtcatccaggctggagtgcaatggcacaatcacggctcactgcagcctctgcctctggagctcaagtgatcctcccacctcagccttccaggtagctgggactataggtgtgcgccaccacacctggctgagtttttaaaatttgtatagagatggggtctcactgtgttgctgaggccggtctcaaactcctaggctcaagcaatcctcccacctgaacctcctaatgtgctgggattataggtgggagcaataatcatttaatctaaaattctctcagatgagtaggtatgggaaaatttttaaaaaaataataatattaaaataataatataatctaaaacctttttttcacaaatatatctcaggcccaaattttcatccgtccatccatacattcatcaattcattcactcaaccatcaaacatttatttatttatttttttgagacagagtctccctccattgcccaggctggagtgcattggctcgatctccactcactgtagcctccgcctcccaggttcaagtgattctcctgcctcagcctcccaagtaactgggactacaggtgcaagctaccacacttggctaattttttgtatttttagtagagatggggtttcaccatgttagccaggatggtgtcgatctcctgacctcgtgatctgcccacctctgcctcccaaagcgctgggattacaggcatgagccaccacacccagcccatgaaacatttattaagggcccattctgggtgacatattatgttaggttggactgtgagggtataaatacaggacaaatgagaagggttccttctgtcaaggagaacacactcgaagatactagaaataaaatagaaacttctacgctaattactaatacagagaattaccagatttttgaaagctcaactaataaagcaaccacccttttctggatatatcaagaaagtgtctgccttggatgtgggatcttagaaaaagaagagtaagtatggaggaaatgaggtcatctccaacagagggactgtgtgatagtatggactgcatatttctgtctcccccaaaattcttagattgaaaccctaaccccccatgtgatagtatttggaggtagagcctttgtgaaataattaggtttagaagaggacatgagagtggagccctcatgataggattagtgtccttaaaagaagaaaaagagactagatctttctgccatgccaggctacagagaaaggtgccatctacaaaccagaaagtggaccctcgccaagaaccaaatctgcaggcaccttgatcttagacttcccagcctccagagctatgagaaataaaggtttgttgtttaagccatccagtctttgctattttttttatggcagcctgaactaagacagcctggcaaacacaggaaaggaagctataaaagggcacaatgggctgggtgcagtggctcacgaatgtaatctcagcactttaggaggccgaggcaggtagatcacttgaggccaaggagttcgaaaccagcctggccaacatggtgaaactccatctctacagaaaatacaaaaattagccaggtgtggtggtgggagcctataatcccagctactcaggaggctgaggcagaagaatcactttagcccaggaggtggaggttgcagtgagccgagattgctccactgcacaccagcctgggcgacagattgagactccgtctccaaaaataaaaggcaccaatgactgtgtgttgagtgaccaattgtgttgagccatagaggaaagatgtaggcaccagtgacttgtccaggatcagggatgacacacttctttttcttgatagctattctgtcctctcccagacattttttttttttttttaacactgctgtcgcccaggcaggagtgcagacatggctcattgcagcctgaacctcctgggctcaaatctcccacctcaggctcccaagtagctgggaccacaggcatgtgccactatgcttggctattttttttttttatgtttcgtatagatagggtctcgctatgttacccaggctggtcctgaactcctggcctcaaatgatcctcctgccttggcctcccaaagtgctgagattgcaggcatgagccgcctcacctggcccctctcccaaactttcttttgaggttaaataatgtaaaaaggaagagtgtgtagaacaaaagtaatagctaatgtaaaaaaaaaagtttaaaacaaaaattatccatatctcactacttagagataaccattatatatattttgacaacaaatacccttctggatttctgcatttgctctgtcagatgttagttgaggtgggacagggaaaggggttaagggaggaggcaaggaaagaagggtcagaatgcaatttatcttacgaggcgttttcccatttagtaatacataatcaacatctctgcatgttttcaagtatataaagctccttagatcattacttattcatagtattacagggattctatgttttctctattataaactacatgttgttgaacttctttcaaactacatctattcatacagcaagtcatttactttgtaaaaattcctaaacttaaatatctggttcaacacaagtatgcaaaattttgtacagattttatttaccatagaactatggctacaaattaaatgaaaataatagtaataaattataataatataggagtcacctcacagatgtttccagtcacaaagtaaggcttttcctgctttgtacttaagttgaaatccccccaaagtgcataaaggcggatacatcctttctagggtacccttttcaccctgtagatgaaccctgacgtggccaactgatctaccgacagtagtacactctagatgtcttttattaaaataatagataatagagtaatccacaaactaggaccttacacacatacgcacagagcaaaagctcctgaggtgcagagcctacaggaaacctcatcaaaagctctgatggctcctgtcgatgagcacctttaggaggggctgctgttgtcttaagtcagaacagagatagtttgtgcctctccattttgaaatgctccagatttcccttccctgtcttggtctctcagagcctaatgtctgtgctggactagcatagtcagtctttggttatgtgtctgtattttctatttaaagtagtctaggctgggtgcagtggctcacacctgtaatcccagcactttgggaggccgaagtgggtggatcacaaagtcaggagttacagaccaccctgaccaacatggtgaaaccccatctctactaaagatacaaaaaattagttgggcgtggtggcgaatgcctgtaatcccagctactcaggaggccgaggcaggagaatcgcttgaacccgggaggtagaggttgcagtgagctgagatcacaccattgcactccagcctgggaaacagggcgagactccatctcaaaaaaaaaagaaaaaaaaaacattagtcggggtggcggcgggcgcctgtaatcccagctactcagaaggctgaggctggagaatcactgaacccaggaggcagaggttgcagtgagctgagattgcaccactgcactccaacctgggcaacagagggagactccgtctaaaaaactaaaataaaataagatactctaaagtaaattatttaaataattctcatcttaagcaagcagtttattcagcatgaggttcaaagtaaataacttcaaatcagatggtcatgaatataacttctttagtcattcaaaacactcagataaacaagacggataacactgaaatgaaatacagacaatgcagtggattttcaacaataactacaaaaaggactgaacaaagagacaaacaatgaatgtgggcttgcctaggaaatacagtagaaatgtcaaaaaaagttaaatgaatgagaggggtactacaatcctccaccccaggaaaccacagcaaggtgccgtggatcctctctgaagcctgacgttcaggttgttcatattttaggtaccctggacacttgctcataggccctgcaagaggttacagcagctgttccctcccacagggcaaagccagatctcacagccacctaggcctccccatgacagggagttgctccctgggacaaagaccagaataggaggaggagggagagataaaaggctcagatttgcataatgtgtcccacaaatacctaacctttatgcaagaggtgaggagggcataaaagagccattagagagtccaacactagctgtgaggccagtgggcccttggaacttcagcaccgtggtctagactcctctcctcctcctcactcagtcactgcccaggttcacagagatttcagatcagcctttagaatgattcttctgccttcttttgggagaaagtgggtctaggaaaaatagaatgcaaatatttttccaatccatagggaacaataagaggtatactagatgaagagtttatggtcaaatattttttcaaaaaaaaaatctctctatgatgtaattctgactgataatagcaaagaaaacaagctccttattttatataaaaaatttttctttttttttttttttttgagatggagtcttgctctgtcacctaggctggagtgcaatggcacgatcttggctcactgcaacctccacctcctgggttcaagtgattctcctgcctcaacctcctagggattacaacctcctagtagctgggattacaggcagccgccacaacgcccggctaatttttgtatttttagtagagacagggtttcaccatgttggtcaggctggtctcaaactcctgacctcgtgatccgcccgcctcggcctcccaaagtgctgggattacaggcatgagccaacgcgcctggcctaaaaaatttttcaaaacaatgcaagtttactacataaaatctggctttttttttttttttttttttttttaatgatgtggtcctgctctgtcattcaggctggagtgcagtggcacaatcactgcttattgcaggcttgacctcccaggttcaagctatcctcccctacctcaatctcccaagtggctgggaacataggtgtgtaccaccacacttggctaatttatttattttctgtacagcctggatccccctgtgttgcccaggctggtcttgaacttctgggctcaagctatccttcctcctcagcctcctaaaattccggaattacaggcgtgagccaccatgcccgacctagaagtatttgtttcaaggagcatatttaactacgccgtaaagaccaaatagttcagaagttagatgttacaattttagtctcttctcctacttcttcttttttttttttttttttttttttgagacagagtctcactctgtcacccaggctggagtgcagtggtgcaatcttggctcactgcaatctctgcctcctgggggggtcaagcaattctcctgcctcagcctcccgagcagctgggagtacgggcatctgccaccacgccggctaatttttgtatttttagtagagacggtgtttctccacgttggccaggctggtctggaactcctgagctcaagtgatttgccccgcctcggcctcccaaagtgctgggattacaggtgtgaaccgccgcgcctggctgttctttcacatattttctccatagttcagatcacaatgtatacaaatttttttcctgctagttttctttcacattactgcaatctatctcttttaaaaaaagtatatagtgcagctatttcagccaggcacggtggttcatgcctgtaatcccagcactttgggaggcagaggcggctgaccacttggggccaatgagtttgagaccagcctgggcaatgtggtgaaaccccatctctactaaaattacaaaaaaataattagccgggcgtgggggcccgcggctgtaatcccagctcctcaggaggctgaggcaggagaatctcttgaccgcaggaggcggaggttgccgtgagccgaaatagtgccactgcactccagcctgggcgacagagtgagtgaggctccgcctcaaaaaaaaaccaaaccaaaacaacaataacgaaaaacaacaaaaaaagtagattgtgcagctatgaaatgaaaagtacaaaactgttcagtttccaggcatttaaaattatttctggccaggcctggtggctcatgcctgtaatcccagcactttgggaggccgaggtgggcacatcacctgagatcaggagtttgagactagcctgaccaacatggagataccctgtctctaactaaaaaaaaaaaaaaaaattatttctactttacatttacattagtacaaccaaagtattgatgaattatcttacatactcaattttggatatatacataaacattcattctgtaaatttttattggatatgttaaaagcatcccatgaggccagcagtggctcacgcctgtaatcccagcattttgggaggccaaggcaggtggatcacctgaagtcaggagtttgagaccagcccggcctacatggtgaaaccctgtctctactaaaaatacaaaaaattagccgggcatggtggcaggtgcctgtagtcccagctacttgggaggctgaggcaggagaactgcttgacccctggaggcagaggttgcagtgagccgagattgcgccattgaactccagcctgggcagcagagtgagactttgtctcaaaaaaaaaaaaaaaaaaagcatcctatgaaaaaaatgaaattattacctttttattcatatattgaaataacttccaaaaaggcttatgccaattgaaactccttttaatacatcctcactgacagtaaacattacaatttatataatattcatcagtacgctaccattgctttaattcccatttttgtttttgctatggagactaaatattttgcatttatttaccaatcagctatatttattctttgtgaaatggacagggatttttttctttacaacaattttataatagtgcattagagatttgtcttagtaatctttttttttttgagatggagtctggccctgtcacccaggctggagtgcaatggtgcgatctcagctcactgcaacctccacctgctgggttcaaataattctcctgcctcagcctcccaagtagctgggattacaggcgcccaccaccatcatgcccagctaatttttgtatttttagtagagatggggtttcaccacattggccaggctggtctcgaactcctgaccttgtgatctgcccaccttggcctcccaaagtgttggaattacaggcgtgagccaacacacccggcccccgatttttcttagtaatctttggaaacacttcagaaatatttttaattagccctttcataatctcaggctataattttcctgtttatatgccataaaatgtgaacatgttacaccgtcaaataaaaaaagcaaggtgcagaagactgtgcataatataaatcagttatttaaaaaaaagaaaagaaaaaataagaaactatctgaaaggctaaaaaaagaatctgagttgttactttttcgatgtttgaagaatgtgaatatattatatactcaacattttaaaataaatgaactttaaaaagaatcctctcaaaatggtgtcagccacaatggcacaccagagagtgggaaggcaacacaatgaccattaactcagttttagctgccttccttgtatcataaaaacttctaatgttccattttccctgtggtaacttccaagatggcctccagtgattccccaccctctggtattcctatctgtatatggtccattcccacatagcatcagggttgctctgggtgaccaagagtatacaacagagtgaagttattttacctccaaggctattataaaaaacattgcaatgccttccttgttctcttttggatcactcattctgtaggaagccagctgacatgtcatgaggaccatatgacaaggaacagagggaggcctcctgccaatacccaagtgagtttgaaagccctagtcaagcctttcacatgatatggccccagtcaacatcttaactgcaacctcatgaaagaagctgagacagcaccactcagttaagtgaccccaaattcctgaccctcggaaaccatgagataacaaatagtggtggttttagttgataagtttgcagtaatatattatacagcaataggtaactaatacagattttagtacctggaagggaggtgctggtgtaatacctaaaatgtaggagtggctttgaaactgggcagtgggcagaagctaaaaaatcttcaaggagattgtcagtgcaagccttagtagaaaactggactctgagaaggctctggtgtagcttaaaatgaagtgaggaacatgttattagaaaattgagcaaggggttacgtagttacgtagtggcagaaagtttagtgactatcacctagtcaggtgaaagtagaaaatgtacctgagtcatctaattgagatttccagccagaatgctgaaagtgctgattggtttcttcttgctacttatagtaaaatctgaggggacagaaacaagctaagggaagaagtgttaaacaaaaaagagccaagagccaatacctgctggttttgaaaattcccagtctttccagatggcaaaagatgctaaaattaactgctcccaagcaaaggttatatccagggcactaaagaaaggtgcagaaatatgaaagatgagggtaaaaatcctttttactttttctttgagacagagtttcacccaggctggagtgtaacggcttgatctcagctcacggcaacctctgcctcccaggttcaagtgattctcctgcctcggcctcccgagtagctggagttacaggtgcaggccaccatgcccagcaaatttttttttttttttttttttttttttagtagagacggggtttcaccatgttggccaggctggtcttgaactcctgacctcaggtgatccaccagccttggattacaagtgtgagccactgcacccagtcagagggtaaaatcctttaaggctctgaaagatcaaaaatgatgcttcagagtacagtagtcccctttatctgtggttttactttccatggtttcagttacccacagtcaattgtggtccaaaaatattaaacggaaaattccagaaataaacaattcataggttttagtttatttatttatttatttaatgacagggtcttgctctgtccttcaggctggagtgcagtggcgtgatctcggttcactgcaacctctgctcctcggcctcaagcaatcctcctacctcagtgtattgagtagctgggattacaagtgcccaccaccacacccaactaacttttgtatttaagtagagatggggtttcactatgttggccaggctgttctcaaactcctgacctcaaatgatctatctgcctcagcctcccaaagtgctgggattagaggcgtgagccaccacactcagccaacaattcttaggttttaaattgcatgccattctggttagtgtgatgaaatctagtgcagtggctctgagttccattcaggacataaatcatcccattgaccagcatctctatgctgtgtatgctatgctcttgtggtgttataatatacattggttttgtccacagttcataactcccacagcccttgttacagtcttttgttataatgttcggtgttaggcctcagaggtaggcttctgaccttctgccatccttttacctgccccaaggcaggactctaatctttctgattgtgggttctaagaccctcccaagagagaatcctgccctatactctagcgggagagaatgcttaagtcatgaagcttccataaaaacccaagaagactgggttcagggagcttccagttagctgaacaacacttggaggttcttggaggttggcgcactcagggaagccatggaagctccatacctctttccacacaccttgccctgtgtgtctcttcatctgtatcttttgtaatatcctttataataaacctgtaaacgtgtttcctcaagttctgtgagctattgtggcaaattaatgaaatccaaagagggggttgtgagaaccccaacttgaagtcagtcagtcagaagttcagtatacccagacttgggagtggtgtctgggggtatggggggaagtctggaggaccgagaccctaacctgtaggatctgacactaaactgttccaggattcctgacactcagagactatgtgagttaatgtttaagctgttagttttgtggtaacctgttatgcagcaacagataacacattcccttccctgtttgcaaagcacacaatcccacccatcaaaaaacatggaaaaatggtactaaggtttcgatgtgtatgtttatacacacccatgcacacatccctcagacagcttttctgtcatttctgacattgtgcctctttctactgttttggattctatcaatccctggataggatcaaggaataaccccatcccattcacatccaaagttctaagccattagcccacatacatgaatacaggggaagatacaaatgagtctaagttataactagagcaggggtcagcaaacttttttctataaagtgtcaggtagtaaatattttaggctttgctgggtgtatatgggtctctggctctaacaatgttttgaaaatttaaacttagcctaaaagccacagtttgccaatgcttgccctaaagctaagaaagacttgtgtcttagtggcagtcttgccacacattgataattgttctaatttcaatctcataaccgggaaggaaagagtctaaaagggctaaccactgaaatggaatttactttatttatatgatgaatgcttttaaaagacaaaataactcacttatataacatttgtctgtttttttgagagagtctcgctccattgcccaggttggagcgcagcagggtgatctcggctaagcctccaccttccacctcctgggttcaagcgattctcctgcctcagcctcccgagtagctgggattacaggcacacaccaccatgcccagccagtttttctatttttagtagagacggggtttcaccatgttggccaggctggtctggaactcctggcctcaagtgatccgcctgctttggcctcccaaagtgttgagattacagttgtgagccaccataccagcatttgaaagaataaaaatcactatgggattaagtaaactcaattgtatttagaatttatcattcttttccatagatgttatcatgaataattacaattgcaaagtacatataactttgtatgttcctttcttattttgcattatagccaaataaaattgtgtactgcaatagctcctataatcactacttttgataactgaatactgtttgtagtaggtatatatttaataatttgactttcagtttggtttccaagttttgggttttttgtttgtttttgaggcagcatctcttgtcacctagtggtacaatcataactcactgcagacctcctggactcaagccctcccgccccatcctctcaagtagctggtcagactacaggtgtgcaccaccacgtcttaattttttttttttgagacgcagtttcactcgtttcccagactggatggagtgcaatggtgcaatctcagctcactgcaacctccacctcccaggttcaagtgattctcctgcctcagcctccccagtagctgggattacaggtgcccgccactacgcctggctaatttttgtatttttagtagagacgggttttcaccatcttggccaggctcgaactcttgaccacatatgatccacccacctctgcctcccaaagtgctgggattacaaacatgagccaccacgcccagctggtttgaatcctttgttaaagaaaattaaaaaataggttaggcatagtggcacacacttgcaatcccaacactttgggaggccagggcaggaggactgtttaagcccaggagttcgagaccagcctgggcaacatagcagaaccctgtctctaccaaaaaaaaaaaaaaaaaaaaaaaaaaaacctcacaaaaaacaatgctaaagaaagcgaatgagatataatgaataaaaacaaaaatagagaaaacaaaactaaagcaaatggggggttgcttcttggaaaaagtaaatcagaaacattgataaaaccaggacgaattaatgacaggaagaggaaatacactttaatattagaaatgagaaaggaagtgggattccgagtagttaaaaccatatcctatcccaaacagaactacttttgcttcaggaaaggaaggtttctaacaagaaagctgtaagtgcaaccaagtaaaaacttgggttagtaaagaaaatgattgtcttaatagatgttgtaaattataaaactaaataattctctttaaagattctaaaaaatagaaatagaaactttttttttttgagatagagcttcgcttgtttcccaggctggatgcaacctccgcctcccaggtacaagcgattcttctgtctcagcctcccaagtagctcggataacaggcatgcgccaccatgcctggctaacttttttgtatttagtagagagggggtttcaccgtgttaggctggtcacaaactcctgacctcaggtgatccacccgctttggcctcccaaagtgcagagattacaagcatgcgccaccacacctggccccaaaaatggaaatagaaattatttaagcaatatacttattacctttaagggcaaatcatttcttattaaagccaagaacaaagaagcccattaactccatcttaaatattgtttagaagttctggctgtagtgccgggcacggtggctcacgcctgtaatcccagcactttgggaggccgaggcaggtggatcatgaggtcaggagatcgagaccatcctggctaacatggtgaaaccccgtctcttctaaaaaaatataaaaaattagccgggcgtggtggcgggcgcctgtagtcccggctacttgggaggctgaggcaggagaatggcgtgaacccgggaggcagagtttgcagtgagccgagatcaggggccactgcactccagcctagctgacagagcgagactctgtctcaaaaaaaaaaaaagttctggtggtagcaataaggctaaaaatgaacacaagtggcaaaaaggcaaagattatacagtggtactaaataaaaattaaaaactaaaaataggccaggcatggtggctcactcctgtaatcccggcactttgggagaccaacgtgggcggatcacttgaggctaggagttcaagaccagcctggccaacacgatgaaacctcgtctctacgaaaagtacaaaaattagctgggcatggtggcacacgcccatagtaccagctgctaggaagaatcacttgaactcagggggtggacattgcagtgacctgggatcgcgccactatactccagcctgggtcacagagcgagactctgtctcaaaaaacaaaacaaacgtcccattttacttatggtggaaagacaatacagcaacaatacagcaacagcatttttttcacaaaacattttattactataattgatattttacttataatttttggcaacattaataaaataataaatttcacctgaaagaacaagcgagcaaaatagacaaggaaattcacaaagggcaataacaaaatagtaatcttgacatattcaatatatttgtaaacaaaacaaagtgacattgccttaaaaatatatagaggtatcaatagaaaaacagagaaagctcctgaaagaactcactatattaattttcatttggttgcaggcacagaaattgactcaagctagctcaattctaagacagaagcaaagcccttgatgctgatcgctttccagctttttcatgaaaacctaggaaatttaaatactttgaagaggaagaaaagagtggggagagagtaaagtgcctttaagaggaaaagtagaagtttttttttttttttaaagggagatctcattgtcagtggcattttaagagccttgaagctcaatgaaccaaaggaagtgtcaaacaattaagtgaggtagcaagccatgcaggcctaggggaagggcattctaagaaagacaacagcatgtgcaaagtctttggattgggaagaatgtgatttgcttaaggaatagcaaggccagtgtgtcaaaatagtgcgtcattggggaaaacagtggagaagcatgacagagaatgaaaaagagaggaaggaggtaggcaggggccagatcactggaatctacagttggcaattaatgaccatatgtactccttaagagcatgctttaatgaaactgcaaacaacagtgttgataataccaaccaatcactcaacatacaactaaaacacttcatatttttaccacagaaacagaatacgggaggtaagtatgaaaagtctgtagatctatttatacacagtgggagtatctacctgagacaagaaaaactggcacacacacacccacttgcacacacataccctttcttcaactaaagaaaggattcaggctgtaattttagcaaagtgtcttaacccaagcaacgtaactgaaaagacctagtatagtgttcaaggtgcaaatcaatcaaatgagtgtccggcaaataaatacaacagaatctatggatctagagtcagaaaattttctaaaatgtagataatatactcacaacttctttgttatctgtactgccttctactctaagagggatgctaagctcttaattatctcttcccggatttttgtgaaagcttaggaaatttaactagattgaggagggaagaaaggagtggggagagataaggtacctttaaaaagaaatcaaggaaaaagggagagatttctccagacctatgtctacagccaagatggcggattccttgactggtgaagacaggctgctgggcaccttggtcaggggtggaggaacaaaggatggcaccagaacacaagcagggagacaactccgggagtccacagaggcagccaagactgctgatgttcaggaaccaatactcaaaaggtactccagaatactgtgaaacagcccctggggagagcaagggaaaaagattcacccatagtacagattagataggatagatcagatgaaggacattaactctaagtcttaaaacttattgaattagagagacatttcttgcacactggtgtgtgtcaggtaagacccaaacagcattagtgtcaaaaaactgggaaactatacatttaacagaatagctgcaagctgtaatacattcatgtccaaagcaagacataaagttgcaagcttcacatgttcaattagggtaagatatatatgcacagaaaaatataaagccattatgggtttaaattcagtcagtcaccctgggctatttttgtccactgtacctactgttgttgggacagtcctcattccagcttaacagtgggaaaactaaatttagcccagtccaggaactggacagacaccacttgtttggcccttttcagttaaaactatgggtccagtacagttcaaattatagatattagggcttcttccccttgggaaacttgctttacagctgtggctgagaatatggccagttcattctccactaacggctagccagaagggagaggagagggaatgaatcaaattcacctttagatcacagaacaggaagtcagctagtaccaggcaccattctattaattttattgctatttcacctcaaaccaatgatacatgacggctgtttgatgtctgcaggggcccttcaccaaacaaaaccattttactttgaatggtttggcttccttggatgttttcaggtaggtaaagatactctgaagcagtgttccttttgacctggccccaagactagaatgaatgtgtgcctatccttcaactagaacaaagaaccactgctctccctcaactaacctccgccttcttggtctctgctcacgcagcagcttctctttcaattccacatcctggcttttcagaatcttttcaggttattttatgccagcacagcagaggcacttctgggaattcggcagcaagtgggccagggcataacaaagccattccagtctgactagagttaaccatgaaatgctgaatgcatggaaaaagctgtaaagaaaactaagtatttcaaaaattctatgaattctgtatatagaaaaaagagctttcaagcttaggagtaacatgaaataccaaaacaataaataggtgccaggggcagtgactcacacaacccagcacttggggaggctgaggcaggaggctcccctaaggtcaggagttcgagaccaccctgggcgacataacaagattccatcgctacaaaaaattaaaataaaaaactagctgggtgtggtggctgcgcctgtagtcctagctactctccaaaggctgaggcggaggaatgcttgagcctggaagttcaaggttgcagtgagctaggatcacgccactgcactccagcctgggtaacagtgagaccctgtctctaaagtaaaaaaaaaaaaaattaaaattaaaaaaataaattaatacctttctctctcacacacacacacacaaacaccttttatgtgttaagccagatacagttaacatgaaaaccagatgttttaaaataatacctcaaaattcagatcaaataatatatatcctgaatcttgtttaaaaagtcatatataatccactagtttcactatttttggtgctactgaataatgtatggtttgtattttttgttttatgaggttttttaatttggtttgaaatacttgctttagatttactgaaactagaattaatgggacttttttgaaattttgcttttagacctggggagtgatggttcagagtcagatgtgctcacagttatggatgctacatccactgatcctggctgaagaggttccagtgacacttgaatagtaacttttgtttcaggaggtaatccttctagttgcttaggcttcttaaacatttgatgacactgggtcttgtgctccattttctccttgaaagttaaaaactgtagccggcacttggaacactggtgtgcactctttccccagtggcccctataatgacacatgtatggtgttgctgttttgaaaattttgagacaaaagggacaaagcaaattctttgtgttttcatggcacgttctaaaatgtgtttctacatcagcaaagaccgacgatctataatggcaaacctggcacacatagggcatttcgccaggcttatgatggtccttcatgtgttgtaagaggacctgatctgtttcaaatgacaattcacagattttacagacagtagagggctcctgggcagtgtggacattttcgatgtgacactgtagctggaagggagtgggaaactgccggtggcagtgctggcaggtggtgtggttttcccagctgtcgttcctctgcttctcaaattccaaatgatgcttcacgtgattcataaacttaacattttttagaactttcacgcagctgaggcatttaaaggtggtgtgagtcttctgttccggctgcccttctcctttatgctgtccatagtaaaagtcactaagtaacacaatgggattttctttcttgggatcaaaggtcttgttttgacttgttagactcaaaatgtctgtttttgccaattcattttccctatcaagatttgtatttataggcttgaaatggatattgtcctttggaaaagctgctggaaaaggtgctccattctgaacatggcttaatgaggtatgaacattatttgagggtgtactttgctgagtattcattgtatgaaaggtatctgaagggaacgaagctgaagaatttccttctataattccatccctgagtttagcccttttgggatttatgctgtttacttcgaaagtggaaagttgctttgatacacgaggactttcatttatacctcctactgaaagtgctgtacttactggatgatgcaatgaatctgtgaatgtaatcaaaggagaaggtaattctgaagagttattaggcacaacttgtggtgaactatttctataatcaggtttagacaaaggctcaataataataggactatctgttgatctcgattcaagttgggaagctggcaggacggtcactgcttctgatgtaacggtctcatgacttttaggctgcaatttgcgagcagtatcttttctaaggtgatcatacttttttctccttgaccatgaacccggggtgactctgttcaaaatgtttgaaacgactggttttgaatttgaagtcaccccaacaaagattagctcagcatcttcatttacatgttccacaccaacaaagatgagctcagcatcttcgtcatctacttgtttggtttcttgtatgttcttctgtggttcaggctctttctcttcctcacatgattgttccattttctaatttttttattcctgaatggtggggccacaagtcccaatgcttcctttatataaactgccacctaagtacaaacatacatcagtaagtacaggaaaatgcattaccttatttaattttcctccaaaacattgtttttataaaccactattttacccacaaggacactgagactgaaagaggataaataacagcttaaaacctgtgataaaagatcaggttcctatgaatctagaatcataactttgctgtactgattgtgctctattccattttaaaaaaaaaacctaccagcagctaatcactaggcaaaattatatggaaaagacacacatttttatgagggcatcattgtgcagtgtttagaaacatgggctttggagttgaagagtaagctggaatccttagtctgccacacaccagatgcttcctctttagcaagttttttacttttaaatgtattttgctatcttaaaggcaaaaattcttatttcttagacttacagtaatagctggttttttaaaagcaccacctattcaatggcagcttgatttgtagtggaattggaagaaaattacaataaatgaaaatatctcaattgattcatatatagtaatctcataaacattaatatagaaaagaggtattaaatttatagagttagagtacctacacataaccaacaaacagcatagcacaatgtcaattgccaggcagataatctcatcccaactcatggccttaattataatccattcagtaatgcctcctaaattttcccctccagttctgacttacccactgaacttaaacacaacagtgcttcctcctcaatctcttctccacatagcaagcagattgattgtgttaaacaaagtcagactgtatcattgttcagctcaaaaccctccaacggctttctgattaactgagagtaaaagaccaagtattaccaatgcctagaagactacactaccaaccccacatactgctcctgcagttatctcatactactctccactatccacttcactgtagtcacactaacctccttgctatttattttaattttttaaattaaattttatttttttgagatggagtcccgctctatcacccaggtatatatttcagctcactgcaacctccaccttccaggttcaagtgattcttgtgcctcagcctcctgagaagctgggactacaggcatgcaccaccacacccagctaatttttgtattttcagtagagatcgggtttcaccatgttgaccaggctggtcttgaattccttatctcaggtgatccacgtgccttggcctcccaaagtgctaggattacaggggtgaggaactgcacctggccctccctgctatttcttgaacatactaagctcttttccttgctcaaagcccttgttccttccaatatgaatgatcatttgggtatccgcatggctagctcctcactgcccttagggctctattccaagtatccctctcggtgaggttcttaaatattccaaccaacctctaacccacattcctaatctcttttcccttttctttcatccccaaagccctatcaccatttaacatattacgatcctatttatcttgattattttctattgtccatccagtggaacataaaactcaaaagggcaggtattctatcttttgttgactgttgtatgcccagcacaaagaacagtgtctggcacaggacaggtgctcaacaaatacagaatttgttaaatgaatcaataaatatcgactctccttcataagatcctttatttttaaagaagattatgctccattaattccacattttctatgaatttactctgagaactttatccattggaaattccgtaggccaataaaggacttaaagctagctttttacaaatatttgaccacaaccaatagtttaaaaaaaaaaaagtgatatggagtccaattacacaagcacatacacataaataataactacctttactacacaggctgcattctaaaattttctatttcatttttcttgtctttttcttttttttttttttttgagacggagtctagctctgtcgcccaggctggaatacagtggcgcaatctcagctcacggcaacctctgcctcccgggttcaagcaagtctcctgactcagcctccagggtagctgggattacaggcacatgccaccacacccagctaatttttgtattttttagtagagacggagtttcactgtgttggccaggctggtcttgaactcctgaccttgtgattcaccagcctcggcctcccaaagtgctgggattacaagcatgagccatggattacaagcctgagctgtgcccagcctcatttttcttaaactaaccacagacccacaaaatcagttaagcctcatcactaggtcactactagttgtttcaaaaactggtctaatgctagcaaaatgtacgcactagaaaccaaggttcataactcaccaatttctaaaaacatatcaagattcactgtatccccatgtggacccttcaaatcagcataatccaaagcataaaaattaaattgacatctaataaatgccatgcacatttgttttaattttaattaggatatcagtatctaattttggaacatatagacaatatttattcctataaatatgtgtatcaccttggaagtgaatttaaaaaggaatacaatattaagtaagcattgtcaactatatacaaactggtgtatcatgaatagtgatttacaacttaattagtagatatataatgccagaaaaaatataaggcagatatgaatacactgctctctggagtcaactaaaattggtttagtctgtctatatacaacttcaatcgcctaactccaggatgatgtcacctagcccagtgtttcctaagcattactgacatttgggactagataattctttgctgggggctgtcgagagcactgtaggatgtttagcagcatctgtgatctctacccactagaaaccagcagtagtcccccagggtggcaactaaaaatggctccaggaattaccaaatgtcctgtgggaaaactcctgcccaaatccaatcttctcaggatcacttccacatttccagtaactaccttctacataattctaaatgtattttctaacatcctctctaaagaaaatatctggccgggcacggtggctcatgcctgtaatctcagcactttgggaggccaaggcagttggatcacaaggttaggaattggagaccagcctggccaacatagtgaaaccctgtctctactaaaaatacaaaaaattagctgggcctggtggtggacacctgtaatcccagctacttgggaggctgaggcaggagaatcgcttgaatccaggaggcggaggttgcagtaagccaagaccacgtcactgcactccagcccgggtgacagtgcgagactgcatctcaaaaaaaaaaaagaaaatattctaattcacaatcattaatattctccaatatcctaaaaaatcagactataatctgacaacatggccattagatttatctgaagattaattagtttattattgttattattttttctttttcaagacggagtcttgctttgtcacccaggctgaagtgcagtggcatgatctcggctcactgcaacctctgcttcccaggttcaagttattctcctgcctcagcctcccgtgtagctgggattacaggtgcgccaccacgcccagctaatttttgtatttttagtagagacggggtttcaccatgatggccaggatggtcttcatctcctgacctcatggtctgcctgccttggcctcccaaagtgctgggattacaggcgtaagccaccatgcccggccaatctgaagattaatttttaaagcccccagaagtttatgatttactaaagttatatggagggtttgtagacagagttagcactaagatgcctaattcctgaattctggttttgtgctctttctgctaaaactgacttagtgcacacttatttctgatgatattgctgttaactgcttagtctttaagaattaaagtgtctcattggattcattttttcactctctattttgtaaacctgttcaaacctcctctacctcccagaaaatgtcaaagtaccttataagccattttaaataacttttagagcatcactcattctacctctcatgtccattcctattaatggcccccagcccaggccgcaacttctaggtttaggtccactggttacttcatttttgtacacttgtactagaccctaaattgttctgtctcttttctctgtccttcaaattatataacacaacaccacaagatggatcttaaaacacaactgtaattatatcactcttctatccctaagcgttaaatgattcctccaattctagagaatattttaggtatacataatttgtgttatgctatgggctgaactgtgttccccccacccccaaatttgtatactgaagctataacccccaatgtgatggtatatagagatggtggctttgggtaataatcaggttaagatgtattcatgaggatagggccctcatgatgtgattggcgcccttataagaggagatatcacagaccttgcttcctctttctgtcatgtgagaacacagcaagaaggctgtcatccaccagccaggaagagagccttcactaaggaaccaaatcgtccagcatcttgatcttgaacttcccagcctaaaaatgtgagaaatgaattcctgttattaataaaccatcaaacaagtaaagaagaaaaacttaaactgggttctaatgacactgctggacttcctaaccagttgctcttggttagatttttggctgttgtccatactgattaaccctccatccaaccatcaatcaaggtgaaaaagaggaatagagcaaggatcaggaacaaagctaataagttaatgaacaagttcattaagaacaagagtagcattagaccatgagagttttcttctcctctagatgtccagagacccttctctacaaatgtccaccaatggatgaatgaatgcttattttccaatttgccagaatcttgagatactggggtagggaggttagacatgcaaagatatatcagatctaacaggtttgtcctcaaaaatcaattctcacctcccatgatgggagaagccaataggagggcttcaattccaaagaaagctgagagatcagtggatgataacccaccttccagattatttctatgcattcaaacaatggcccttctactagatcattgttttttgttttttttgagatggagtcttgctctgtcacccaggctggaatgcagtggcgcaatctcggcccactgcaatctctgcctcccgggttcaagcagttttcctgcctgaggagctgggattacaggtgcgtgccaccacgcctggctaatttttgtatttttagtagagatggggtttcaccatgttggccaggctggtctcaaactcctgaccttgtgatctgcctgcgtcggcctcccaaagtgctgggattacaggcgtgagccaccgtgcccagcctctagtaaaccattgttattaccacacacgagtttttaaccacacacatactcttctgaggaaaggcttccccaaactattggtccttatgatgagatctggccatatatatttttcttctgaaccccaggattgtggggctgtcacatttcctctaacagtacaccttaggagctcccagacttgaagaaaattggctgtttcccacatttgaacattttccactttttccctcagtctacctttttgaattgatttctgactacttctagataacctttttccattaatgaatattgagtgcttattgtgtgccaggcactgctttaggcacttgagagaaatcggtaaacattaacagacagaaatgaacaacaaaaacaaactatttcaacagaaggaactaacaaacagtccagtggaggaagaaagatagtaagtataataaaaatgcaaattctctggtgaactggaagatgacgttatagaattaggaaaaaaataatagagcaggcttagaagttgaggaggtataagagaattgtaattttacgtagtgtagtcagagtaagtctcatggagaaggtaaatttggacatacacttgaaggggataaaaggtcagagaggtagcaagagtggaaatagtagtaaggatctgtaaattcttcatttttctctcagtttagtctgtggcaactgtcatgtcttttgataaggaacgaccttggtttaatagttactcccctcctagactctcaggctagattttttttttttttaattgagacggagtcttgctcttgttgcccaggctggagtgcagtggcacagtcttgtgcacagtcttggctcactgcaaactctgcctcccaggttcaattgattctcttgcctcagcctaccaagtagctgggattacaggcgcccaccaccatgcctggcgaatttttgtatttttagtagagatggagtttcaccatgttggccaggctggtctcgaacccctgacctcaggttatccacccacctcggcctcccaaaatgctgagattacaggcgtgagccactgcgcctggccttttttttttttttttttttaagatggagtctcgctgtgtcacccaggatggagtgcagtggcacaatctcaactcactgcaacttctcctgagatgcttgtgcctcagcctcctgagcagctgggactataggtgtgcgccaccatgcctggttaattttttgtatttttattagagatggggtttccccatgttgtccacactggtctcgaactcctgacctcaagtgatccacccaccttggcctccaaaagtgccgggattacaggcgtgagccactgcacctggcctctcaggctagtttcaaccctattttacactcctctaccatcctcagcttacttttgaaaaagtatttattaaaaaatatttatgaaaaagttatttttgttttatttagttgccctgggatggaatacaaatgtttgctgtagttttaaggatcctataaaactcccatttactgcaaggatctctgtttaatgggcattcaattctaagatagcaaacgtgtagagttatttgtgggggtgggggacaagtttgagaaagaagcagtggggtgaagaaagtgataggcaagggaagatggtggggataggtaccataggagtcctggtggcctaaaatctaatcacagaagttactcaagtgggactgatgcctgaaaaaaatttgtgtgtggctataacagtgagtgggatctactcttttttttttttttttgagatgggagtctcgctctgtcacccaggctggagtgcagtgccgtgatctcggctcactgcaacctccacctcctgggttcaagcaattctcctgtcttggcctcccaagtagctgggactacaggcacatgctaccacgcccatctaatttttgtatttttagtagcgacggggtttgatcatattggtcatgctgctctcaaactcctaacctcaggtgatagacccgccttaggctcccaaagtactggaattacaggcgtgaggcaccgtgcccagcctgggatctactcttaagcaacagagaaaatcagtcatttttccccttttccttcccttcctcctatgagcagaatcttggtctccatctttaaaaaaaaaaaaaaaaaaaaaaaaaggccaggcacagtggctcacacctgtaatcccagcactttgggaggccgaggtaggcagataacctgaggtcaggagttcgagaccagcctgaccaacatggtgaaactccatctctactaaaaacacaaaaatttgccgggagtggtggtgggcgcctgtaatcccagctacttggtaggctgaggcaagagaatcaattgaacccgggaggcggaggttacaaaggagatttgacagggtggcagttcaaactaaaagtggtctgatagttcagagtcaagtttcttcactaaagctgagtttttaaagggcttgaagaatgatgtaaagaggggttgtggaggaccacaaaaaaagacaactaaaaaaaggcataacaaagtcaacttattaaatgcccagcaacagggtgaagttaaggggaatggtggaataaagacctacaaatagctgctgcttcataaaagcaaagagaacactagcaaaaactacaaaaatcacgtttttcagatcctggaaattaacgaaagcttgtaaaactcaaaagattttattacaaaatggcttggcggttcctcaaaatgttaaacatagacttatgatcccacaaatctaagtatacactcaaagaaataaaggtactcaagtacatgtatacatgtttatagcaacaactcataataatcaaaaggtggaaacaacctaaatgtccatcaatggatgaatggataaacaaaccatggtatatacatacaacagaatgtttattcagccataaaagaaacgacatactgatacatgctacaacagggtaaaccctgaaaatataccatgtaaaagaagtcagtgacaaaagctcatatattgtatgatttcatttacaggaaatatcagaaatagataaatccatagatattaaacaaagatttgtggttgccagaagataggaaagggaaaatggtgagaaactgcttaatgggtaaaggggttttactttggaatgatggaaatgtatcagaactagatagaggcagcacacgtacaatattacaaatgcactaaatatcactaaactgtttattttaaaatgactgatgttatgtgactttcacctcaatgaattattttttaaaaataaagagggtatattactaccaaccacacagaaaaaaagagaattataaaggaatactatgaaaaattatctgtcaacaaattagataacctagatgaaacaaattcctagaaagacaggaactaatgaactgactcaagaacaaacagaaaatatgaatggatccaaaacaagcaatagaattagtaatcaaaaaacttccccaaataaaagcccaaaatcagatagctatgctagtaaattcttaacgtttttaaaagaattaacaccaatccttcattaactcttccaaaaattagaagaggagagaaaactttgcacatctttctatgaggctagttattactcttacaccaaaatcaaaccaagaaatcatatataaaaaaagaaaactacaggccaatatcctttttttttttttttttttttttttttttggagacggggtctcgctctgtcgcccaggctggagtgcagtggcgtgatctcggctcactacaagctccgcctcccaggttcaggccattctcctgcctcagcctcccgagtagctgggactacaggagcccgccatcacgcccagctaatttttttgtattttttagtggagacggggtttcactgttttagccaggatggtctcaatctcctgacctcgtgatctgctcgccttggcctcccaaagtgctgggattacaggcgtgagccactgtgcccagccaatatcccttacagaggcaaaaatcctcaacaaaatgttagcaaacaaaatctaacaacatatataacgattacataccatgaccaagtgggatttatttaaaaaatacaaggatggttcattctatgaaaatcaaccaacaataattttatttttattatttttaattttaattttttttttgagtcggaatttcattcttgttgcccaggctggagtgaaatggcacgatcttggctgaccacaacctccgcctcccgggttcaagcaattctcctgcctctgcctcccaagtaggtgggattacaggcatgcgtcaccacgcccagctaatttgtttgtatttttagtagagacatggtttctccatgctggtcaggctggtctcgaactcccgacctcaggtgatccgcctgccttggcctcccaaagtgctgggattacaggcgtgagccaccatgcccagcctataccattttaataaaggacaaaaactacacctgcctgcagaaaaaacacttgacaaaagctaacatccttttatgatttgaaacaacaaaacgattaggaatagaaggaaactttctccaccagacaaaggcatctgtatgagactcacagctattatagtatcatacttaatggtgacactgaaagtacccctgcccctaagatcaggaacaagacagatatccactttaaccacttcaactcaacaccgtactagaggttctatagccaaggtaattaggcaagaaaaggaagcaaaaagcattcagattggaaagcaagaagtaaaaccataatggagatgacaaatacaaataactcaattttttaaaaggccaaagaacttgaatagacatttctccaaagatgatacacaaaagaccaagtaaatatattcagtgtcattaatcataaaagcaatgcacattaaaaccaccttgagataccacctcacacctagtaggatgactactattaaaaaacaaacattgttggaaagaaattagaatcctcatgcacagtcactggattgtaaaatggtataactactatggaaaacagtacagaaatgcctcataaaattaaaaacagaactactatatgttctagcaatcttacttctgggtatatatctaaaataattgaaagcagggtctcgaagagatactggcacacccatgttcacagaaggactattaaaatagccaaggggtagaagcaacccaaatgtctacccaaaaatgaataaacaaaatattatatatatatatgcacacacacacaatagaatattattcaacctcaaaaaggaagaaaatctgtcacatgctacatgtttgaaccttgaggatattatgccaaataaaataaaccagtcacaaaaagacaaatacttttgtatttgtataattccacctatatgaggtaactaaaatagtcaaattcatagaaacagaaagtagaggccggaagcagtggctcacacctgtaatcccaggactttgggaggctgaggtgggcagatcatctgaggtcaggagttcgagatcagcttggccaacatggcaaaaccctgtctctactaaaaaaaatacaaaaattagccagatgtggtggcaggcacctataaacccagctacttgggaggctgaggcaggagaattgcttgaacccaggaggcggaggttgcagtgagctaagatcacgccactgcactccagcctaggcgacaagagagaaactctgtttcaaaaaaaattagctgggcgtagtggtggcacacacctgtagtcccagctactcgggaagctgaggcagaagaatcccctgaatctgggaggcagaagttgcagtgagtggagatcgcaccactgcactccagcctgggcaacacaccaagactccgtctcaaaaaaaaaaaaaacaaaaaacaaaaaacaaaaaaccaaaaaaacaaaaaacagaaggtagagtaatggttaccaagggctaggggcagaggaaaagggtgagtctgttgtttaatgggcattgtttcagttctgcaagatgaaaaagttctagagatctgtttcacatcaatgcttgaaactactgaactattaatttagaaatggttaaggtggtaaattatatgcgtttttaccacaataaaacaattcattttaaaaacaggccccaatcggcatggtggctcacgtctataatcccagcactctgggaggccaaggtgggagaatcacttacagtcaggagtttgagaccagcctggccaacatagcaaaaccctgtctctactaaaaatacaaaaattagccggcatggtggcacgcgcctgtaatcgcagctactcgagaggctgaggcaggaagaatcacttgaatccaggaggcagaggttacagtgagccgagatcatgccaccacactccagcctgggcgacagagtgagactctgttaaaaaaataaaataaaataaaaaataaaaaataagctagacacagtggctcacgcctgtaatcccaacactttggaaggctgagatgggaggatcgcttgagcccaagagttgaagatcagtccaagcaatgtagtgagaccccttctctacaaaaaatttaaaaacacaggcacagtggctcatacctgtaatcccagtattttgggaggctgaggcaggaggacttagtcagctcaggaattccagaccagcttgtacaacatagtgagaccctacctctacaaaaaattaaaaaattaaccgggcgtggtagagtgtgcccgtgatcacatcactgcactacaaccttggtgccagagcaagactgtctcaagaaaaaaaaaaaatttaaatttagctgggcatcatggcacacgcctgtagtcccagctactcaggggtggaatgaggcagggtggcagctgagatgggaggatcactggagcctgggaggtcgatgttgcagtgggccataattgtgtcactgtactgcagcctgggcaacagagcgagaccctgtctcaaaaacaaacaataaaaaatgggcgaaggatttgaacacttctccaaagatacacaaatggccaagcagcacatgaaatgctgctcaatatagtcattaaggaaatgcaaatcaaaatcacaatgagctattacttcacatccactaggttagttataagcaaaaacaatctcaagcgttgcagaggatgtgcagctatctgaaccctcaaatactgctggtgataatataaacttgtactttggaaaagtttggcaattgctcaaaatttaaatatggcgttaccatatgacccaacaatatcactcctaggtatatacccaagagaattgaaaatataacacatatataagctagctggaatatagccataatgctgctacaaagtgcaaacaaccgaatgtaaattaattgataaatgaataaacgaactgtggtatatccgtacaatgaaatactattcagccataaaaaaactaagtacaaacaagcatacaatacggtgtaccttgaaaatacactaagtgaataacaccagacacaaaaggccgcatattttattattttacttatacaaaatgtccagaataaggcaaattcatacagacagaaataaagtagcagctgccatgggctcgatgaagaagaatgaaaggaatatagcaggtttgaaaaatggcccccaaaatatcaggtcctaatcccttaagcctgtaaatgataccttatttggaaaaaggatctttgcagatgggaaaattatcctggactatacaggtgggccctaaatgccaccacaaatgtccttgtaagagaagcagagggagatttcacacatactctaggaaaaggtgatgtgaagacagaagcaaagattagagtgacatggtcacaagccaaagaacgtcacatccacaaactagaagatgcaaagaatggattctccgctagagtttcccaggggaggacagccctgccaacatcttgatttaggtcttgtgaaacttattttagacttctgacctcccgaactaagggagaataaatttttgttgttttatgccaccaagtttgtgataatttgttatagcagctatggaaaagtaatatagggagtgactgctaatggatacaaggtttctttagagttgatgaaatgtcttggaattagatattgctgatggttgtacaattttgtaagtatataatactaaaaaccattcaatttcacaccgcaaagggtgaattttatggcatatgaactatatttcaaagaaaaacaaatgcctagtaacaggctggtataacccgccatctcccaacaactgctgctaaattttcaaagcaccattaagcagactcaattcgtagcaaggataatggaacaatgcaagctcatctagcgaacaaaaagaattaagctagtatcaggtggtcaatttacaaactgtagtgggagtcatacattcccaaggatggaacagttatatctccttgcagagtgaactcttctccgataccaaggacttggaagaccaaataaattatacgtaggattaccaaatatgctggtatgaccaagacagttatagtttaaacttctatctctgtggaattatggatagtgccactcttcaatctttaataagtccttcagtttagatgataaattacatagtcaacctagttataaggaatctagaggttgtgaaaagctgtgagagcatattctatgcagaccacataggtcctatcatgactccctatgtaacttgggtctctgcgactgggaagctcccagggaaaaaaccccagttaagacttctgcagagcattcacattttgtttcaaacttatacaacactaatgctaaagctcaactctcagaattgtattattcagtattatccaaataactgattaatttacacactgaagggaaagaacaaggaatggacctatacacacttgtagtttacaagtataagaagctaacaaagaataagattaaaataacttgtgccaggccgggcatggtggctcacgcctgtaatcccagcactttgggaggctgaggcaggtggctcacgaggccaggagtttcagaccagcctgaacaacatggtgaaaccccatctctactaaaaatacaaaaacttagctgagcgtggtggcacacgcctgtaatcccagctactcaggaggcaggagaattgcttgaacccgggaggcagaggttgcagtgagctgagattgtgccactgcactccggcctggacaacacagcaagactccgtctgaaaaaaaaaaaaaaaaaaaaacaaacaacttgtgcccacattaactaggtgttaaaagccaaaaggtgaaagtcactattctcttttcacatatcaaattgaccctaaggtaatattgctgcattagaactgagctggtgggagggatgttaagaaattagggagaaattgttaatctacagaaagaccatcatataaggttctgtgtgtagccaaacatacacatttgatgttctgatgtttgctattttagtggaactatagctataaaatgtattcaatcagtagaattaaaacatatcccagtccacaaaaaactaagagagaaattatacaggaatgatcaagaatctgcacagttctcataatctcattactagagagaaaaggagaaagggaagcatcaaggtagtatttgagacgaatttaagaagaccactcattcaataaaagtttggtgggccaacaaggtgccatgtattggtctggtgatatagcagtgatccaaagtctttcacttcagggagctgacattccagaaggagtagtcagaaaataatttttttaacaaaagtaacatggttatataaacactagggagaaaaataaagtaggaaatggaggcaggttgatactcacataacatgaatatggctgtctggggaagaatactccaacaaagggaacagcaaacacaaagcctctgagactggagcacttaacacatgcaaggactgatcaataggctaacacaggtggaccaatgaaaagagtgacaagttagaaatgagataaaaaatgagctgtttgtggcaaaggaaagccaagatcatgtaggccattctaaattcttcagctttggccaggtgtggtggctcacatctgtaatcccaacactttgggaggccgaggcgggtggatcacctgaggtcagaagttcgagaccggcctggccaacatggtgaaaccccatctctactaaaaatacaaaacgtagccaagtgtgctggcatgtgcctgtagtcccagctactcgggaggctgaggcaggagaattgcttgaacccagaagacagaggctgcggtgtgctgagatcatgccactgcactccagcctgggtggcagagcaagactccatctcaaaaaaataaataaaaataaaaataaaaataaaataataataatacaaaaattagctgggtgtggtggcgggcacctgtaatcccagctacttgggaggctgaggaggagaatcacttgaacccaggaagcagaggttgcagtgagccgagactgcgccattgcactccagcctgggtgacagagcgaaactccatctcaaaaaataagtacataaatagacaaaaaataaaaacaaattcttcagcttttaccctgagtgtgatgagagattactggaaggctctgagtgagaagtaatatgatctcactcatttcattaggattgctgtggttactgtgtggagaatagactttagagagtaatagtggaagcagaagacaagaagctactgaaatattataaacaaaagatgatggtagtatcagacaggatggagaaatagagatactaagaagtcggactctagataaaaatctagaaggcccaattcattgatggattgggtttgggatgtgaaggagaggaggaggacacacaagaggtaatgctgagcaggtaaatctatgagatcagagcccaaggaaagttccgaggtaggtacttaaattttgaagtcttcagtatgtagcattatttaaaacacaagactggatgagatcactcagggaaaagaggtctgagatctaagctctggggcattccattgattagaggtcatggagatgagaaggagctggtaaaggaaattaaaaaaaaaacaattattcacagccattcaggtgggaggagaattgagaaagagaagcatcccagaatccaatggggaggagaaaaggaactgtaatatatgctgccaatagatcaaataaaatcacgaaaatcaactaaaactgaccaatggattaagcaaagtggaattcattggtgaccttgacagcagtgggtttaaggaagaacgagaacaggagatagcaaatacggacaactctggagaaattttcctgtaaggacaagcaaatacaaattaaaacaagcagatgggagatgtggcatcaaaaacgagatctttaaggtgaggtgatggtacaatcagtatgtttgctatattaatgatctggagagatagaaaacttaaccctagacaaagagaagtcttgctagaataatatccttaaataaacaagtgcacatgtagaggttctggccttagcaagaagtcaaattattcacccagagtaacaggacaatgctttgagatcctatggaaaagggttaaatggtggataaatggttgcggtggccatcctccaagatggccctaaatgaatcccacttcctggaattcacatagttgtagccctctcccactaacagggttggcctgtgggatcaagcacatacagcaggaagtgatggtatgccacttcagaaattaggtcataaagactctgcccttcatcttgggtacaaggtctcttgaatcatttgctctgaagtaagccagctgctgtgacatgaacagccccatggagaggcccacagagcaaggaactgaggcctcttgccaacagcccagtgagtgagcttagaggcagatgatccaaaccaagtcaattccgcagagactgacaatccagccaaaggtttcactgaaacctcatgagtgaccttgagccagaaacagccagctaagccactcttggattccagaccttcaaaaactatgaggtaataaatttttttttaaactactaagttttgagacaatttgttacacggcaatagataactaatacaatgggtctcactgagctgtaatcacaaattgctgggcacacaattcactataatctcacctactggcatgcaatgacttcagatgacctcccctgtcctgctgcatgcagttacctcatgaaatacagtcgctgagaaagagggtaggataaaaggagtcagctttatataacttaacatccctgatgctcttttttttttttcaagagatgtggtaaaagaatgccactaccaccctctcctttctcaacaaagcaatttagagggttcccgaatgacctacatcaacaattggcctgaactaatcaaacgcatcattcagattccctcagtaaaatattgaataccaaacagctatgcttcagcaaaggaaagggcaagggagcgaaactgaaggacgaaaatacaactttggtcctcatcagggagacttctcttttcttacctcaggtttattacaacgcaacttttaagaacttgagctattccaggcagaaggtcacatccttgaggtaaccagagagaagcattagttacttacatgtcacaagaatattttcgatcccactgcctgacattgccatttaggtgtttatcaatcatctcacacttaaccagataagtgaactgaactcctttcccccagatctgttcctccaatctaccctaccttagcaaaggaaaacgtcccacccgccaactgcccaaatcaaaagcctgcaaatcacccgaggtcctggctctcacgggagggactccattagggtcccaggggctgcattaagagtcccgacagcgacgcagtaaatgagacaagacgctgcggtaggggagagagacccatacattcaaatgccttaaggggtctgggcctacaggtctccagaactggggagggcctggggttacaaagcagttttcagatttttaaatacattgagcgccaaaagagaccccgcgggggcgatgggggaggggagcgcactgggagccaggaaaggccccttctccaggaggcccgggcccagcccgggggtgggggcgtctgcgtgagggagtggaggctgatgtaaaagtggcgcccgctgagattagggaagggggtgtgcgtgaggggatcgtgggacctggttctgccctgcactcccccacagaaagcggctgtattgcaaaggccgctccggcagcgcacggccaagcgcggtgtcgcgacccgcagggctgcggctcgccatgaaatccctcaagtctcccctcagggaacgctgaagccgcgccacgcccccgtccttaccagtccggatcagctgctgttcgcgagctgccggccacgcaccagccccggaggcgctcccggggcacagccggcggcgactacgcctcctcaggcccccggcgccgccgacgcgcacgcctccacacgcgcgcgtccagtggagacctgcgattggctgccaggtgccggcgcgagatcggcgcggctccgagctaggagcatgcgcgcgctctgacgcccctggtggcgacggctggacgcggggttaaattgagaaggaggagggcagcagcaatacccctgaggccttgaaaggatcttgggttccggatcacggttccaggcagtcagggttccagagctgagggggtatccaagcagtcagggttccagagctgaggagcatccaggcagtcagggttccagagctgaggggcacccaggcagtcagggttccagagctgtcgcagccagggcttggggtggggggtaggcttccagtccatcaggggatggtttgcccaccagaaggccagctgttataattctcaggtgtggtccctttgttgactatccatgcttaagggattgtgaggaaacaactgaacctaacatctgtcctcttctagttacatctggggccagttgaatccagcctgccacctgtttttgtacagctggcagcaagctaagaaccgatttcacgtttttttaatggctaaaaagagaatattttgtggcatgtgaaaattatatgaaattcaaaattcagtgtccataaataaagttttattggaacaacaaacatgcccattcctttcggtattatttatgcctgttttcctgcttcaacagcaaagttgattaattgccagagaccatgtatgaaaagcttaaaatatttactgtctggccctttacagaaagtttgcccactcagtttacttgcagctttgattttttttttgaattgaccaattctgccaaaagtctattttagcaatctttttggggggcgggtaaatcgcttttggtttaattaatctataatgttattttcttatctattttatctatttcttccattctgttattttcttccttcgtgacttcataggcttgttctgttacttctcattacaacttttggagaaaaatgcctacctcgtttgcttgtaaacttttttgtttctcttgtatttaatgctataaatttacctttaagtaccagtttaactgtgtctcaccagtccgcttggtaatatgttcattatccttcaattagatatgtcctaattttgctagttgttagaaatgcttgttccctggtgccgcaaagaaatagcacttgaacataaatttaattttctcagcaaggccattttcactttctgcagaaagggtacactcgccagcagttttgccacgagagtaccccaaacaaaggatacagggttatttataacctgacgcatccaccctactgctgtgtccggtttccattggctggaacaggacctcacattctgtgtttgtcccgattggctaacaacttagaactttctaaaagaggcaaaggcagaggagaacaaaggaaggaggatgtaacttgtagaatgctgagaaaggtaaaaacacctccaaataggaagaggaacaggctatgacctaatgcttgcttggaccagtataagcatgcaagggcaaatatttaggctaaattgtgggagctaagaacacaaagtatattaatttctttattacggctagcagatatctaagaatgttagcacaggtctttgaataaattttacttctaagagaagttactatttattcgtaattagacagggaggaaagtctttgaagaggaacctctactttattttttacatagtgattctttctaacacaagggttatatagtatatgttatttatttttgaaatctatgagatttttaaaagattttttaattgtattataatcaaatcacatggcctaaatattactcacccttgcatttgaagatttctgttcagtgaagtgtaccatagtcaaaatgaagagatcatagatgtaaagaagatatttgcagtatctaaaatgtatatatgaggctgatatgtaaagatatttgcattatctaaaatgtatatatgaggctgatatgtaaagaagatatttgcaatatctaaaatgtacgtaagaggcctggcacggtggctcacacctgtaatcccagcatttttggagaccaaggcaggcagatcacttgaggtcaggagttcaagaccagcctggccaacatggtgaaaccccatttttgtacaaaaaatacaaaaattagctgggtgtggtggcacgcgcctgtagtcctagctactcgggaggctgaggcatgagaactgtttgaacctgggaggcagaggttgcagtgagctgagattgcaccactgtactccagccttgggcaacagagcgagactccgtctcaaaaaataataacatgaaaaataaatctatgagaaatgatcttcttttggcttcataataattccaatgtccatcagtaaattagtatcaactaagctccaggctttattcaaatgtcactagtttttcccatcatcctttttgttccagattcccacccaggatactgaattgtacttggtcattttgtgttcttagccttctgtggtctgtgacagtttcttaaacttttcttgcttttcatgaccttgacaattttaagaagtaaaggtcaggtatttttcagagtgtctctcaatttaggtttgatgtttttctcatggttacactggggttatggtttttagaagactatcacagacatgatgtgtctttctcataatttctcatcagcgatccatgctatcaataagacttcctactggcttctccgctgtaaattacttcccccccctttcataccttattctaaatcttgcctacatgcaggaaggccgtgaggtctcattgaaggaaaattatctacacaagttactttgcaattcttctttaaggaagatttgtctcttcttcctttagttttaaattaatcaaaaatagctttttagttttaaattaatcaaaaataaaataaaaaatttagtacctcagtcatacttgccacatttcaacagatcaatagtcacctgtagcatattggacagagcagaagtagagcattttcatcattgcagaaagatctacggacagcactgacttagatcattagtcaacctttcttcttcccaaatatatgcatttagaaatataaattcccatgaaatgctttagttccatcccataaattttgtggctgttttcaatatctttcagttcaacattttccttttttcactgcaatttcttagaggagctatgggttattcagaatgaggaccaggactggggtgagataagcaaggaggctgaggcacattaaggagagacccacgcccagcttcaggtatggcatattgtcaccttaggttccctgcttgcctcaccctagtcccagccctgtttagaaatgtattgcctaatttaggaactttgggttttttttcagtgatctttctgttactgatttgtaagttgattcccgtgtactcagtgggtaactacaaagagccccacagctaacatcacaattaaagtaaactattctacctgagtttgagaccaagaaaagcacacccatgaaagccacttcaattcgcaaagcatttggaatagccaaggcaattttgaacaccaaagttggagaaatgaaactaccacatggaggattatgcaaagctacaataattaagatactgcagcattagcacaaggatagagaacaggacaaatgaaatgaaatagattccagaaacacatatatacaatcatacctgattcacacagtttccacggcaatacagtagggaaggagtggtctttttagtaagtggtgctgattgattttgggtatgtatatgaaaaaattagtcttcatgccttatcacaccattaacaaaaaatcagtttgagatgtctcatcaaaacagtaaagcttctagaacatagaaggaatatctttatgtcgtttgtagacaatttcttaaataagactcatgaaagataaaccataaaaccacgatttagatccaaatatgggacatttccagtgccccagcacccttcccagtcgacagcccagtttttaaaaaggtaggagggggcaaaacttgaatagacatttaataaaaagaaatactcacgtggccgataactatataatctcaaggtccattaatcctcagggaaatgcaaattaaagccacaataaggtaccactacaatttcaagagaagggcacttactaaaaggactgacagtaccaagtgctggatcagtagcagtggaattcgcagtatcggtggtgggaatgtaaatcgtttcaatcactctggaaatgtatttggcagtatctacactagacagctaaatatatgcagttccagcacttctcatagctatatacacccacgagaaatgattacatgcttaccaaaagacacgcacaagctcatagcagctttattcaaaattgccaaagaatcagcctcaaagtccatcaacagtgaaataaatttatacaaaactgccacagtcactcaacaaaattctacccagcaatgaaaaagaatgtgctactgctacacacagcgaaaatgcatctcacttattttatttcattttactttattttgagacagtcatgctctgtcacccaggctggagggcagtggcgcgatctcagctcagtgcaaactccccctcccaggttcaagcgattctcctgcctcagcctcccgagtagctgggactacaggcgcccaccaccacgcttggctaatttttctattttatgcagagaaggggtttcactatgttggccagcctggtctcaaacttctgacgccaagtgatccacccacctcagtctcccaaagtgctgggattacaggcatgagccatcacgcccagccatctcacttattttaaaaagccaaagacaagaatctttgtgtgattccatttatttaaagttcataaacaagaaaaacctctgaggtcagaataagggatgccttgttgggagcatttgactgggaaagggctcaaagactttggagctacttcttgacaatagggagctgatgagatgtcactgtgaaaaacaacctgacagttgatgacattgcttgctagcatctacagccacaatgcacatatggcctagcctcacttctgcctttcggaactcctggaagtcagtcgaacatattttcagctagaatccttgctgcaagggagtctggaatctctagtgttcatagccgtcttctttttagtttttacaggagaagactgagggtcagtgttgctaacaataacggaagccataccacttgatcctggctgaactgaagtttgaataataacttttgtttcacgagggaacccttgcagttgctccggctttttaaatgtttgatggtccttggttttgtgctctatttcctccttcaacgtcaaaaactgtagccggcacttggaacactgaaggaccctccttctgctgtgcctccaacaatgattcatgtatggtattgcagttttgaaaagtttgagacaaaacagacaaagcaaattctttgtgttttcatggcacgttctaaaatgtgtttccacatcagcaaagaccgacgatctgtaatggcaaacctggcacacgtagggcatttcgccaggcttatgatggtccttcatgtgttgtaagaggacctgatctgtttcaaatgacaattcacagattttacagacagcagagggccccatggcgatgtgtacactatcaatgtgacactgtagctggaagggagtgggaaactgccggtggcagtgctggcaggtggtgtggtcttcccagctgtcgttcctctgcttctcaaattccaaatgatgcttcatgtgattcataaacttaatattttttagaactttcacgcagctgaggcatttaaaggtggtgtgagtcttctgttccggctgcccatctcctttatgctgtccatagtaaaagttgctaagtaacacgatgggattttctttcttgggatcaaaggtcttgttttgacttgctagacttgaaatgtctgtcattgccaggccagactcatttgctctctctggatctgtaagattgaaatgtgcctttccattagcatcaggccaaggaaatgttactccattctgaacatggtttgatgagttgcagatcccctgtgagggtgtatttgtgcttattgtagaagacatatctgaagggaccacagctaaagaaggtacccctgggattccatccctgagtttaacccttttggaatctctgctgtttatatctgaagtggaaagtcgctttgaatcaggagaactctcatttctgcctcctccagagaccatagctccaactagacactgagtccctggggggagcgaatctgagtaattgggagaaacaacttgtggtgagctcattttataaccaggttcagatgaagacttcatagtgacaggactatctgtcgatcgcccctcagacagagaaacgggcatgatggcttttgccatagaggtcacatgatttgcaggctgcgacacgtgagcaggatattgacggaagtggcctttctttcttcttgactttgagcctggggtgactctgttcaaaatgtttgaaacgactggttttgaatttgaaatcatcccgacaaagagaacttcagcatctctatgtacatgctccaccccaacatagatcagatctggatcttcatcatcctcctccctttgtttggattctctcaaattcttctttggtgattccactttcttacacaaaaagatatctcccattttcaatttactttttgcttgaagccactggtctcttcaacttccagagctgtctttttacaaattgccacctaagtgcaaccatgtgacaatagtcaatatttatttcgaaagacaaaatcattactttattgtatcctcccttaaaacactgagataaccatcaacatctctattttacacgtcagaaatgaggcttgaaacattttaaatggcataataatttcaaatttacctgtctctcctcccctggtcttctgcagttgtgaggcaaaggaagcaagatttcaggaggtgcagatggaacatctcagagtgcttgcctctaaattttgcactctagatgcctcactcacctcctcctcatcccacaggtactctctcagatgtctaaggtttctaaccaacttgaacaaaacttctctcaaaaacattctgctcctagcctgggcaacatagcaagaccccatctctacaaaaaaatttaaaaattaaaaaaaattagcttggcatggtggtacacacctgtggtcccagctacttgggaggctgagccaagaggaacacttgagcccaggacttcaaagttatgttcatgccactgcactccagcctgggcaaccaaatgagaccccatcacacaaacacacacacacacaaatcacaacacacacacacacacacacacacacacacaccctttgctgttcctgtaatgttccttttctcagtaaactcagttgctcagtctacaaacttcagagtcatcctttgccagactttctctcatacactacagccaatcaattagcaaagctagtctgctctatcttttaaagatatccagaatctgactactctcttccacatctactgccacctccctgatggaaggtaccatgttctctccctggatcactgcagaagttgccagtcttaaaagttttgtcagatctccccatggtggccccaatgcccctgttaaaatatacaggggagcaagtatattttgctcttaagtcttcaatgactttccatttcattcataggaaataccagcaaactttaaatttctccatggaaccttaggtcatcatcgcccttgctaactcctctgttgctctgatgcagccatcctgagctccgtgaatctggaacacaccaggcctttttctttttcagaacttttgttgttcccggacattgcgtgcctctttccccagattaaccccatctgggctcctggtctgcctcagtcccatggttcctcttcagcaaggcttacctgaccacaatatcaaaaatcacaacctccttaactcatatgttcaaaccctcaatgttatttttcaacttagcatttatcactgcctaccacacaatatgtaaaatatatcttgcaagcccaggagtttgagattacagtgagctgtatcatgtcactgcatccagcctgggtgacagaggaaaggaagactctgtgtcttaaaacaacaacaaaaaatgggacaggtgcagtggctcgtacctgtaatcccaacactttgtaaggccaaggcgggaggattgcttgaggtcaggagctcgagaccagcctgggcaacatagcaagacccatctctacaaaaaatttaaaaatataacttgtttcttttctgtgtttacccactaaactgtatgccacatgagggcagggagttgtgtttcatttactcctcagcttatagagcaatgtctgtcatactgtgcatgctaaatctttgttaaataaatagtagctgttattaatatgatcatttaggtgtaccagaggctctaatccattattccagattctctaagcatttaatgaaatccaaatccaaatgatttaatactgttgtacaagggagaaggtaaacctgtgtgtatgtgtgtgtaaattgaaacaaaagttttgtcaaatactctaataccttcaccttaccgcaagggataggctctgataccttctatgccatattttattgattctaaggtataggcttagatttccattttaacatctctaaatcagattgcatctcatcatagcatctcatcaatataaaatacatttcacaatttgtttttgcagtatatatttttatttcatagtggaatcaaaaatgacatatctcagatccttttgtgaggataagcgtgatgcttgggttttcactcatgtgagatgtgcttccctcaaaccttgttatatcagcatgtttaacatctgatgtaaaaaaaaaaaaaaaaaaaggagagtaatgtatcttttataattgatggcatctttttttttttttttttgagatggagtctcgctctgtcgcccaggctggagtgcagtggcgcgatctcggctcactgcaggctccgccccgcggggttcacgccattctcctgcctcagtctcccgcgtagctgggactacaggcgcccgccacctcgcccggctaattttttgtatttttagtagagacggggtttcaccgtgttagccaggatggtctcgatctcctgacctcgtgatccgcccgcctcggcctcccaaagtgctgggattacaggcatgagccactgtgcccggccaattgatggcatcttatagtcagtgaaaaatcctatttctttttgtaagctgacagcccactaaacttgttttgtagttctctaatggatatcacctacattttggcaaacaatggtttaagacagaaattggaaaattggcccttcccctgtttttgtacagtcaggaagccaagaatgtttcttacatttttaaggtattgttttcttactttttttttattaagatttttttaaacttgtacatttttagatttgggggaataaacacgcaaaaggaagcggggcgcggtggctcacgcctgtaatcccagcacttttgggaggccgaggtgggcggatcacttgagctcaggagttcgagaccagcctggccaacatggtgaaaccccttctctactaaaaatacaaaaattagccaggcatggtagcagatgcctgtagtcccagctactagggaggctgaggcaggagaatctcttgaacctgggaggtggaggttgcagtgagcgaagatcgcaccactgtgctccagcctgggtgacagagtgagactgtctcaaaaaaaaaaaaaaaaagaaaaaaggaatattttgtgatgtgaaaattatataacattcaaaatgtcagtgttcactataaagtgttgtggaacacagccataatcatttttttagtgctgttgtccatggctgctttcacacttctatgacacagttgagtacagtagtacccccttatctttggggcatatgttccaagacccccgaagtggatgcttgaaactgcagatggaaccaaattcaatatatactatattttttcatatatgtacatacctatgatcaagcttaatttataaataggcacagtaagaggttaagcataacaaaataattataacaatatactgtaataaaagatatgtgagatagtgcgtggtggctcatgcctgtaacctcagcactttgggaggctgaggtgggtggatcacctgaggtcaggagtttgagaccagcctggccaacatggtgaaacccatctctactaaaaatacaaaaattatctgggcatagtggcgagcacctgtaatctcagccacttgggaggctgaggcaggagaatcacttgaacccgggaggcgtgggttgcagtgagccgagatcgcgccgtggcactccagcctgggcggccagagtgaaactccgtttcaaaaaaataaattaataaattaaattaaaggtatgtgaatgcaatctctcgctgacaaaatatctttatgtactgtagatcttggcaaccttagcatacgattttgttttctttccttattatgttaaaaactttcccattttcacttaaaggaagcaagcactttacagcttctttttggcatatttcaatcgccagcattgctacccttgtactttggggccattattaagtaccataagggttaattgaacacaagcactgagataccaccaggacagtcactctgataactgcgaccgctcctaagtgactaaggtacagagagcgcagccagccaacagcatggggactcaggacaaagggaggattaccatcccagggcagggctgactcaagagcttatcacactactcagaagggctggcgacttaaaatttatgtattgcctatttctggaattttccaattaatattttggaacctcaggtaactgaaagcacagaaaggaaaaccctggataagggaagactactgtagttggagcagagaattgcaatacctaaaatatttgccatctagtctttcacagaacaagtttgccagctctagttttagaggagcaaaatgaaagatagcaaatttctcagctcaccagttcctaaagttgcgagtgcatccagatgattcagtgcagctcagtatgttccactctgggccacaagggaaagcgaagctggagcttccttgtctccacctccgggagaaatttgtccagagaccggcagcactgcttccgcaggcgaacaacgccgcttgctcttcaaagtcctttctgaggccagatcagaaggtcccactccttttaagccccttattgcccaatcatttttccagtcacgtgtctgaagcagtttatcctgattggattttcagttgttgtccagcttgattgccaaaagttttcctccaattgctactcaaaggaaagaatgagggtggggcttcagggctgctttccaggttgattgagctgctgatgggcatcctccctcctctctctcttgttcagagtctaccactttctctgcagtgtgcctgggccctcagctattggggatgagaagggatgcggagtgggaggcagtccacatgtctgttccaacaaagctcagaggtgagcgagttaaaaagcagatgtctttccagtaggagccccaggggacagggtgggtctcacagcccttgaagaccgagctcccgtaggagtttccaggtgtccaaacagggtcctcactgtgagtcttcaacagctttctccaagcagcagcccactcccttcttaatccatttccaggggtcaaaggtctatcctggttccctcccatgccctctcacttccttccctctgtctctccctcctccctcctccttcactaccccctccctggaaccttctcagctgaatttcaggcccaccctttcactctctttacaggctttgcaacacagattagaaagcgggggagggggagcctcaagagtcccttgacaggtaagaaatatttatatttccacccccattccaacgcaatgcaatcaagtctcaaaattaaaacgaaaatcatttgcaaattaaaatgttctaaagtaccatctcctgataaaactttaaaaatacctttctgggccggatgtggtgactcacatctgtaatcccagcacttttgaaggccgaggcagcagatcacatgagcccattagtttgagaccagcctggccaacatgatgaaaacctgtctcttattctttataaagtaaaatacaaaaatttcctgggcgtggccgtgcgtgcctgtaatcccaggtactcgggaggctgaggcagaataatcacttgaacccagtaggcagagcccaaggtggtataaaagtgtgtgacccatggtctttattcttgtctagggactggggaaaggctgcttgagggcattgcaagtagccaagagcatgcccctggaaaggaaggtgaaatgaggcccgctactgaggtacacctgtagtcccagctatcaaaggctgaggtgaaagatctttgagcccaggaaatccagacaaacctcagcaaaatatcaagacctctgtttctacaaaagaaaaaaaaaatttttttaattagccaggcattgtagcacgtgcctgtagtcccagctacccgggaggctgaggtgggaggattgcttgaaccagggagatcgaggttgcagtgaactatgattgcatcacatactttagcctggatggaagagagagaccttgtctcattcattcattcataaataaataagcaagcaaagtgaaatgaagtgcaagacttagacagtaaagttctaacaggggccgggcgtggtggctcacgcctgtaatcccagcgcttaggcagaggcaggcaggtggcttgagcccaggagtttgagattagcctgggcaacctggcaaaaccgtgtctccacaagaaaatacaaaaaattagcctgggtgacagagtgaaaccctgtctcaaaaaaataaaaaaagaaaaaagaaaggaagacagagaaagaaagaagtaaagaaagagaaaaaaaggaaggaaagaaaggaaaggaaatgtgtattctgcagaactgatattcactccttcctcttttccagaagcagaatcctgctaggaagattccaggaagcctaggcagtggtcaggggctggctcaggtataaagcaggcccttcccctgagacagaaggttgtggcaacaatgcttgtgggaggtgagaaaattgagaggagtgtctagaaatagctcggagttgcatcttattttcttttgctcagttttaaaagtcccaaataagaccacatctagctgttctaaccaagctattctaacccactaatctagtaaaaataaaatcacatggtctgaatataaatttgcatcaggatacatgcctttcctatgaaacatttatgtttccttataaaatgtatcctccttttctgcagaaaactaactgtaatgcatccaaaggtcacagaatgtggtgaaacatcctcatcattgatttttaaaaaaatttttatttatttatttatttgttttttgagacatggtctcacattctgttgcccaggctggagtgcagtggaacgatcatgcagtcttgatgtcctggacccgagcgatcctcccacctcagtctcccaagtagccaggacaataggcagatgccaccatgtctaactgatttatttttatttttgagtagagatgaggtctcactatgttgcctgaactggtctcaagctcctgagctcaagcaaacttcccacctcggcctcccaaagttctgggattacaggcgtgaactacccgcaccctgccctccataactgattcttttttttcagacttcactctgttggccaggctggagtacagtggcgtgatctctgctcactgcaacctccgtctcccaggctcaagcagttctcgtgcctcagcctctcaagtagctgggattacaggcatgagccaacacgcccggctaatgtttgtatttttagtagagacagggtttcaccatgttggccaggctggtcttgaactcctgatctcaggtaatctgcccacctcggcctcccaaagtgctaggattaaaggcgtgagccaccacgcccagccatagctgattctttatcagtctgcctttgggaagtttccactgggaaacactctccaggactgtttcggaccagccccactttccaaacaaagaattccagtgatgagattaaagcttgtcacaatatgtttttcaaatgactggtagaagcagaccttaagattaaaaaagaagaagaaaaaatggctgaaatcttgaatcctttattgctttaaggcacagaataggaaatggatggcgcgtcgggaatggatgcaggtcagggacagaccatcactcatgccaccttgctgtgtttatgaaacagagtgctagaagttaaatttgggggatgcacaaagagatgcctaatcagatgaactcagagttggaattgctgtttgtgagacagttacatcaaaggaagaaaagaaggagagaagaaaggtgactatcaggagaattttccagccagaagaaagacacagaggcacaggcatttcatggcctgaaaaaggaagagcacagagacaagtgtggctccagttaaaggaccagcggagatgaaagatgaggtcagtgatttgggtaggggacatagcagttaagatattgttggtcaaggctgggcgtggtggctcacgcctgttaatcccagcactttggcaggccaaggcgggtgaatcacgaggttaggagatcaagagcatcctggctaacacagtgaaactccgtctctactaaaaatacaaaaaaattagccgggcgtggtggcgggcgcctgtagtcccagctacttgggaggctgaggcaggagaatggtgcaaacccaggaggcggagcttgcagtgagccaaggttgcaccatagcactccaacctgggtgacagagtgagacccagcctcaaaatactactactactaataataataataataaaaacaaaacaaactaaaacactcaggagagattagtggtctaaaagcatatttttacaatgtattcagggttattccattgtttcttaaaaactacctttgggagcatctccccaaacttagtttggaagtgttttttctgggttgcaataaacaagcaaacaaaaaactaccttttaattaaaagtaatccttaaatagagctaacaataaaatcaaacacacaaaaaaattatccattttaaaattttttttatatgaagtcttgctctgttgcccacccaggctggagtgcaatggtgccatctcggctcactgcaaccttcaccccccgggttcaagcaattctctcacctctgcctcccaagtagctgggactacagtcacgtgcgagcacacccagctcatttttgtatttttagtagagacagggtttcacaatgttggccaggttggtcttgaactcctgacttcaagtgatcccctgcctcagcctcccgaggtgctgtgattacaggcgtgagacaccgcacccggccaaaattcatccattaattgtaaagtaaatttcccttctgccccagatcacagttacctgtctctattcccaaaataaatggctgtgtagaatttctgatgtgtccttcaatatatattctctgcatctacatacacttaccttcccctacctttttatgtaaatgggtgtttattattcacatactccgtattaaaattgtgatttattaacataattttactgacattttaatttgaatggagataaatttataaaggggattgatgattaagattttatgtttaaatattcggaagcaaacagtaatgcatcttatcttctgagtaggatgtgggttgaaactgcaaaggcaagcatgagatgtttcattaacacaaagccttgagtgctccaaacccaaaagtcaaagcaacttatcaataaatgccaaaggatgctattctgacatatctgtgtgctgtggtttgaatgcagactccaaatctcatgtgtgggaaacttaatttccaatgtgggactattgaaaggtggggcctttaagaggtgattgaatcatgagggctctgccttcatgaatgaattaatccattcgtggattaatgggttgatgggttaatggcttatcatggaaggggagctggtggctttataagaagagaagagagacctgagccaacatgctcagcctccttcatgagatgccctctgcggcatcaggatgctgcagagacccccaaccaggtaagaaggcttttaccaggcatgccccctccactttgggcttcccagcctccataactgtgagaaattcattttctttataaactacccagtttcagatattttgttgtaagcaacagacaacggactaagacactgtgttatctaattatgtgattcttgttttactatttatttatttagccacttgtcagaaaaatttttttttttttgagataaagtctcactctgtcacccagactggagtgcagtgctgctctcatggctcactgctgcctcgaactccctggctcaaacgatcctcccaccttagtttttcaagtagctgggactactacaggtgtgcgccaccatgactggctactacttttttttttttaatattgcccaggctggtctcaaactcctggcctcaaaagatcctcttgcctcagcctcccaaagtgctggcattgtaggtgtgagccaccacacccagcccaccaaaagttttttcagacatgtacctgagtgattaagagtttaggattggctgggcacggtggctcacgcctataatcccagcagtttgggaggccaagacgggcagatcctgaggtcaggagttcaagaccagcctgaacaacatggagaaaccccatctctactaaaaatacaaaatttgccaggtgtggtggcacatgcctgtaatcccagctacttgggaagtctgaggcaggagaatcgcttgaacccgcaagggagaggttgcggtgagccgagatcgtgccattgcactccagcctgggcaacaggcaacaagagtaaaactctgtctcaaaaaaaaaaaaaaaaaaagagtttaggatctatattcgctctgcctgggtccaaatcctggatgttattaactgtatgactttgggcaagtttattaacacctccattttaaaaaaatctgtactaggaatataataataaatgcataccctctcaggatttgattaaatggaataaaatatatagaattcctagaacagtgccaggagtttgaggccagcctgggcaacatagtgagaccccatctgtacaaaaaatacataaaaaatgaggggggaatagcggtgcacacctgtggactcagctacttgataggctgagatgggaggattgcttgagcccgggggccaaagctgcagcagtgcagtgactgcgtcccagtaatcccagcactttgggagggcaaggcaggaggatcccttgaggccaggagttcaagaccagcctgtgcaacataaagagactccatctgtacaacaacaacaaaaattcttacgcacttagtatttgccagatataatgccaatttctagggcacaaaggcaaatggtaactacctccctggattgttgtaaaaataaagcatgcaaaacattttgtgcccccaatgatcccttcctcatggtgtccccacacttttattttgtgctgtcacaatgagcagggcaccaccaggatactgggaaataatgacgtgtgatttccaagaccaggtcacaaaaaacattttgccttgccctcttgaatcacctgctctggtggaaaccagacaactgttatttatgtcatagcattcaagcggccctatggagaggtccatgtggtaaggaactgaggcttcctgccaacagccaagtgaaagagccatcttggaagaggatccgcctcccaagttggccaagccaacattttgagtataacctcataagagtctctgagccagaaccacacagctaagctgcagtaactttgaagtaataatgatttattgttgttaagccactaagttttgggataatttgttatgtagtaatagatagctaatacagttgtgcttattacgtttggtactcgttactatcaccaccacatcagtgcattgtagaaaacaaattctatgtattaaactgttttgtttcccctctggattaagctgggctcacaaggggaaaggtgcccaccagagtttttttcttttttatgtaatcaagtttttaaaattttattctattctactttatttttttaagttccagggtacatgttcaggatatgcaggtttgttatgtaagtaaacatgtgccatgatggtttgctgcaactatcaactcatcacctaagtattaagcccaatatgcattagctctttttcataacgctctacctccctcctaccctcccgtaaaaggccccagtgtgtgttgttcccctccctgtatccatgtgttctcattgttaagctctccacttataagtgagaacatctggtgtctggttttctgttcctgcattagtttgctgaggataatggcttccagcttatggatgtatagtattccatggtgtgtatgtaccagattttcttttttcttttctttttttttttttttttttgagacggagtctcactctgtcgcccagctggagtacagtggcatgatctctgctcactgcaacctccgcctcccgggttcaagcgattctcctgcctcagcctcccgagtagctgggattacaggcgcataccaccacgcctggctagttttttgtgtttttagtagagacggggtttcaccgtattagccaggatggtctcaatctccttacctcaggtgatctgcccgcctcggcctcccaaagtgttgggattacaggcgtgagtcactgcgcctggtcagtaccacattttctttaaccagcctgtcgatggaaatttgggttgattccatgtctttgctactgtgactagtgctgcaatgaacatacacaaaattatctgaatgattgcagtaaacatcatatatttgtttgccagctaccataataaaataccatagattgggtggcttaaccaacagaaatttattttcccacaattctggaggctggaagtccaagatcaaggtgttggcagggttggtttcttctgaggccttggcttgcaagatggccaccttcttgctatatctttacatgatcattcctctgtgcgtgttcgtgtcctaattttttcttcttataaggacaccagtcattttggattagggctctttcatatgacttcattttaatcttaactgcttctttaaaagccctatctggaaataaagtcacattctgaggttactgggggatagaattacaacaaatgaattttgggaggacacaaatcagcccataacacatcattgccagcatcacatgtggagcattcaactggagaaactgccctaatttctcatttgaaggtctaaacatctcttttatcaaaataagccaggttctattaagaaggctgaatgtgcatctggctcgatcaacaggcgtctggctgcttcaaatgcttgatttttttcattctcagagaatgaaatcaatgttgaaatattgagtatattctatacaaaatcttcatgtcacaatgaataagaaaagtagttttttttgagacaggatcttgctctgtagctcaggctgcagtttttggagtgcactggtatgacataactcgctgtagcttccatttcttgggttcaagtaatcctcccacctcagcctcctgagtagctgggactataggcatgtgctaccactccaggttaattattattattattatttttgagacggagtctcgctctgttgcccagcctggagtgcagtggcgccatctctgctcactgcaagctccgtctcccgtgttcacgccattctcctgcctcagcctcccaagtagctgggactatagacgcccaccaccacacctggctaatttttcgtatttttttagtatttttttgtatttttttaatagagatggggtttcaccatgttagccaggatggtctcagtctcctgacctcgtgatccacccgcctcagcctcccaaagtgctgggattacaggcgtgagccaccgaatccagccactccaggctaattattttattgtatttttagtagagatggggtcttgctatgttgcccaggctggaatcaaactcctgggcttaagcaatcctcctgccccagcctcccaaagtgttgggattataggcaccagccactgcacccagtcaagaaaatattttctaatactgaatacagctaaagaatggatggtaaaccattattgtccagtcaggatcactgtcatccaagtgggacactcagtatttgagattctgggtggtgctataatacttgttgccttggtatctgagtgagcacttagtctaagtataataattttctggaggagtatattagggttctccagaaagacagaaccaatagaatggatgaatagatagatggatagatagatagaaagatagattgatagggccgggcgcggtggctcacacgtgtaatcccaccactttgggaggccaaggcaggcagatcacgaggtcaggagatccagaccatcctggctaatgtggtgaaaccccatctctactaaaaatacaaaaaactaaccagacgtggtggcaggcacctgtagtcccagctactcgggagctgaagcaggagaatggcgtgaacccgggaagcagaacttgcagtgagccgagatcacgccactgcactccagcctgcgacagaacgagactccgtctcaaaaaaaaaaaaaaaagaaagatagattgatagatagatatgtgagtatgtgaggggatttgttaggggaactgtctcatgcaattatgaaggctaagaagttccacagcaggccatctgcaagctggagatcctgggatgctgacagcatggctcactctgagtccaaaagcctcagaactagcggtgtaattctcagtccagtgctgaaggcctgagaagctagggagtgagggtgcactgctagtgcaagttgtggagtccaaagaccagagagccttgagttgtgacatctaagtacaggagaggaagagtgtatctcagctccaaaaggtagatcaacacattcacctttcctctgtttttgttattttcagtactggcctttggatggcacccacctacatggagggcagatcttccccacctagtccactcacactcatgcgttaatctcttctggaaacacagacacacccaaagatagtactttaccaggtttttaggtattctttaatccagtcaagatgacacctaaaattaaccatcgcaagggtatattcaatctgaatggccaaaattatctgatagagccttcagatacttgtacttaacagatgtactcttgggattaaatgagtttatgctcaagaaatgatattagccaggcataggggtgcatgccgttgtcctagctaccgtggaggctaggacaggaggagcattgcttgagactgggagcttgaggctgcagtgagctgcgatggttccactgcactccagcctgggtgactgggcaagaccccactgcaaagagagagaggcagagagagagagtagaaatggtatctgttattttacattaaaagttctggaataggggagtgctatggtctgaacgtatccctccaaagttcatgttggaacttatgacccaatgtgatagtattaagaggtggggcttttacgagatgactaggctattagaggcctacccttatgatgaatgaattaatgtccttatcaaaaagattccatttccactatgctgagagcggaaaacaaacaaacaaacaaacacaaatgaggttccacacagcactcatcctttttgcccttccacccttctgccatgtgaggacaaagcagcaagtctccattttggaagcagagagcagccctcaccaaatctgaatctgttggtgccttgatattgaacttcctagcctctagaactgtaagaaatgtttctgttttgttgttgttttttccgagacgaagtctcgctcttgttgcccaggctggagtgcaatggtgtgatcttggctcactgcaacctccgcctcccaggttcaagggactctcctgcctcagcctcctgagtagctgggattacaggcacgtgccaccacgcctggccaatttttgtacttttagcaaaagtggggcctcaccatgttggccaggctggtctcaaactcctgacctcaggcgatctgcccacctcggcctcccaaagcactggaattgcaggcacgaaccaccgctcccagctgagattttctgttctttgtaaattacccagtctcaagttattttgttatagcagcaaaagcaaattaaagaaggtataatatcaggctctcttctgattccctaggctctgctgcacgaattgttatttccagaagttcccataggaagttctcaggaaatgaaatggatatgaggtaacctcatgtcggggagtcagtctatggaggatcataatcatacaacaacatggtccacccttgctataatctattttttttttttttttttgagacggagttgctctgtcacccacgctggaattcaatggcgtgatctacgctcactgcaacctctgcctcccaggttcaagagagtctcctgtctcagcctcctgagtagctgggaccacaggcacacaacaccacacctggctaattttttggatttttggtagagactgggtttcgccatgttgcccaggctggtcttgaactcctgagctcaggcaatttacctaccttgccctcccaaagtgttgggattacagtcgtgagccactgcacccagctgttttctgttttctgacttttatttttgagacagggtctcgctctgttgcccaggctggagtgcaatggtacaatctcggctcactgcaacatctgcctcccgggttcaagtgattctcctgtctcagcctccacagtagctaggattacaggcgcctgccaccacacccagctaatttttgtatttttagtgaagacatggttttgccatgttggccaagctgttctcaaactcttgacttcaggtgatccgcccaccttagcctaccaaagtgctgggattacaggcacgagccactgcgcccggccttgttttctgttttgtttgtttgttttttaagagatagggtcttgctctgtcagctaggctggagtgcagtggcacaatcagctcactgcagccttgaactcctgggcccaagaaatcctcccaccacagccttctgagtagccaggactataggtgagcactggttaaatttttaatttttttttgtagagacagagtcttgctatgtagtataggctggtctcaaattcctagcctcaagtggtcctccagcttcagcctcccaaaatttgggaatttcaggcatgagccactgcatctgaccgtacaaaatgttaataaactggccaggtgtggtggctcatgcctgtaatcccagtactttgggaggctgaggcagggagatcacctgaggtcaggagtttgagaccagcctggccaatgtggtgaaacccccatctctacagaaaatacaaaaattagccaggcgtggtggcccatgcgtgtaatccgagctacttgggaggctgaggcaggagaatcgcttgaacctgggaggcggaggttgcagtgagccgagatcagagcactgcactccagcctgggtgacagagtgagactccgtctcaaaaaaaaaaaaagttaataaaccttttactcctggcctcaagtgttccggctgcctcagcctcccaaaatgctgggattacaagcatgagccatttatttttctttttttgagacgggagctcactctgttacccaggctggagtgtagtagcatgatcacaactcactgcaaccttgaactcttggattcaagtgatcctcatgcctcagcctcctgagtagctgggactataggtgcacactgacatgctcagctcattcaaaaattttttcataagagatggagggggggtcttgctatgctgcccagcctggtcttgaactcctggactcaagcgatcctcttgccttggcttcccagaatgctaggattacaggtgtgagctactgtgcctggcttttgatttttagacagggtcttgctctgttgccgaggctggagtgcattggtgtgatcatagctcactgcagccttgaattcctgagtttaagtgatcctcctgcttcagtctcccaagttgctaggactacaggtgtgtgccaccacgcccagctactttatgaacgttttgattccaaagtctgaaaaaagttttccagattcatctccaggtcaaataatgtccctgctgtcaggcatcctgctttagaagcaagatgtagcatttttcttcctttacttgcagcaggcagctaataactgttatcctgtgctggaccatccatgttctacgcattctaacatgtgctttacataaaaaattagcccaagtgaccctcactgtgacattacacggtacgtattattaatctttttttttttttttttttttttgaggtggggtctcactttgttgccaaggctggagtacaatggctcatgcctgtaatcccagcactttgggaggttgagttgggaagatcccttgaacccaggacttcgagactagcctgggcaacataggaagacccccatctctagaaaaaataaaaacatagccatgcatggtggcatgtgcctgtggtcccagctacttgggaggctgagaaaggaggatcacttgagcctgggaggttgaggctgcagtgagccatgatcatgctactacactccagcctgggtgacagagtgggaccctatctctaaaaagagagagagagagaaagagggagagcttttaaaaaatggcaaaatgtgcccacagctgatgggcctatttttcttttttttttttttattgagacggagtcttgctctgtcacccaggctggagtagtggtgtgatctcggctcactgcaacttctgcttcccgggcttaagcgattcccctgcctcagtctcctgagtagctggaaatacaggcacccgccaccatgcctggctaatttttgtatttttagtagagacagggtttcaccacattggccaggctggtctcgaactcctgacctcaggtgatccgcctgcctcggcgtcccaaagtgctgggattacaggcgtgagccactgcacccagccaatttctatttcttatagagcttacggtaggaggcttgaagatgggaacagaagaaaaaaggttgaagggcccagctgctgtgtgttgcaagacaggaaattgctgacagtctgcaatgccagcagcctcatgggtggttatcaccaggacagaggcctcagaacaggcaggactgggtgtgctggcactcacggctacgtgcagatagagcccgcccctgggccttggtgtgtgaccttcttcccaggtgcttctttgggaagctgtacagtgagggagatgaggcagactaagggcaggacacactagcataggagcggtggcagctaagtaggctgactgcccagggattgcagagttcacctgcacagtatgacatctctcatccttttggatagattgttctataaggtggcctccacctacccccaactcccaaatctgacattcattcatctacttcccctgaagtgctccctagcacttgccatgagtttgttcactcttgggaccccaaatccaaggcatctcactggctgagattcagtttaccacctcattgatggggggactcttatgtcacagaagtaattttctcactgataggacccaagatgtcgtcctatttttaatgtgggtacaaatactaagtaaatatgatcttagtgttttgccaaaaggaattaagatgtttttaatgggtcacaaattcagaaaggggttggacctggtgggacaggttggtgaggcccagaagctccacttcaagtgcagtactggacatccccttccagtacgggaggtctgacttgtgcagtcaagcccaatactggcacagccacaggccagggatggaggcttatgagtccactggaaaacagggaggactgagtccagggtctcaagggtttagtagtgagggctcctgtgaagaacccttcactcagtggtgttcattaccggccccttccttagtatgttccaggccctgaggatgtaccttgcatgctctgaccctttgaacaccaaagaaataagcaaggagataacagatgccccaaagagatgaatggtgtcatgagatctgggggctgggaccttgtccagcctaaaggtgtaagtaccatggatgagcagtgtcttatttaatcagcaactagagatttcctgaggtttaactgggaaagcaggttcatatactacaagacaccaggtgcttcacattgcttctctttattttcaacagtttctttacaacagtctacacagggattaactcctacatgtacttcccaagccagaatctccctttagaaattcagattctatttctaactctataagatgtatctccccaaagatcacattaactcctcaagtcaacatctgcctatccccaacttcccctttttttcctcactgaacatttgtctgaatgttttttcctcactgaacatgttttcctcactcacactgaacatttgtctgaaactgtggctgctttgttgcttcaagatgcatgcacatcctggctttagtgtccaagtatgcagaatgaagcatttgatatgtgcacccagctagttaggcatgaaacaggggcacaggatgggctccgggtcatagaaggttctgtccccacagtgaggacaggggttggcactaagccagaccatgctgggccgccccaactcacacagcaactccctgagcctggcatgcagataggcaagcctctccaggtggagggtaccatggatgtcctcataactctccagggggacaggatacagcacgtgggtcagattgctcagcccgatgaggtgctgcaggagactctgcaaggcagatatggagatggaattcccgtagaagcttaaggttgtaagctgggagcagtggctcagggaaggcaggagggcaaggagctgatcatccgtgatcccacactcatcaaagaccaggtcctggagggtggcagaggctctctccagcagagcttggaggggctcgggacttacatcggtcagcatgaccccacttagactcaggacacttagctgactgacgctgggactctgggacagatgcatcacatccccttccgaaagccggcagttagttattgagagggtttccaaggggttcatcacgtgcctgcaaatagacaaagcagttagtgctggggaatggtggtagtggggtggggagactggagagaggcccatttcaccaaaacccaaagtcttcctgatgatggttaaccgccaggatgccatgctgtaaaggagcattcaaggagtacaagttcaggtttagtcctttctccatcatttgctgtgtaagtgggtcaagtaaacaaagatctcaaacactcccttggctgatctgtgaggcagggtccaacacagacctcttaggtggtgtgagcatgaattgaattgagagcctgatttgatgtctcaagcaaggaaaggcatcagtgaattttagtatttgaagatacaactgaaaatactttctttcaactcgggcttccttctgccactgcctgggccccagtcacctctatctctgtgcctgatgaagctactagggagtattcacagtggacaaactggggcaaggtcagcaacatccaaagggggttcccaggctgcagggctaccttaggtcactgtatcatcagcaaaccacctatcaatttttgcaatttctctgttgttccttctcccacatctccagaatcctgcatttcccacctattaccctaactggaattctaaatcaccctttacagacaggaaatttgaggcaggtttagagggagcagctcatgttgagaagctggtgagcgcacagcttacaatttcaaatctcacctttgatgggctttcccttcttcaatgccctccttgcttacttttgatcatcttaggcatcacttcctaaggaagaatgcctaaagccacccttgccaggccccaacctcccattacagagttttctaacaaggagtcactgttaatagcatctatcctaatgtatacctctaacccttatgagtagtagttatgtgataccatgcttggggacagtggtgaacaagacgtgttaactggtagtgacttgctcactcttgcattattggtggctggcacatacaagatatcctttattgtttactgcaataaggaagggcttgctctggtctgcagagaaatctcaccatccctcacctgagcaactgatccaggcggcctctaaggaaaaataaagagtccacatagagagcctgcaggcactgcagactgaggaactgagaggtgaactgggcgatatactgctcttccttctccggggaaatgtaggaagatgcatggatgtgggagaggaggagtctacgcagattaatcatctggcccaggtaaggagaaaatttcgccaaggtgggtagcttccaggtacaagtcacttccaaatcttcaatagagtccagctgcaccattttcaggatcatcttgatatcctgcatgggcattgcaaaaatcttcagcttcttacagcacaggcgtagtacatttttctttcgcttcactttctcaatgaggtaggagaacaattcatcacaggcaccttccttgaggaacaggtctacgagcacctctactggaatgaagggctgctctgcctctgtgctcaaaccatctacttttcgcttctttgtcatgggctgagctgcttctggctctggaaatgagtacagactggccctgtttccagaccatacagtccagaagtcctgatgagagttcttccgtaaatccagcacttgaagtttccacctcctgtggggaaaaacaggtaattagctgagatgatgctttaagatcaactcaaaataagaccatgagtctcataatgtaggtaagaaccaaacagacatccaccttagatctgcacttttacttcgtacttcaggcatcagctgctccctttcccactaggatcctgggatccttcctggtccccaattcccaccccaccaggaggaagcaggtgcatgttccttcagacacctctgcattttaatcagtgccccatgtccagaagcccattccaagagtgacccctgcagtagccccaaggcctccctgaacttccttgctggcaaccatcagagcctctggcccagccttaggcgctccatgctccctgaccccagctgcatcctgctcaggttcccagggccccacaccaagctgctaggtcacccttacctggggcgaacctcctgggcaaggagcacatcaagtccatcaagcacagctttgaaggtctccaggtgaagatgttgtcccttcatcagcactcccagagggaggcaggtgaagggccaggcctgcaccattgccttcagggtctggctgtgtctcccgtcaaaggctgccatgaagagtggcgggaagagctccctgggcagcaactccagggcggcaatggccagggcctcatccttcagcaggctctgccctgccagctccacaagtctccgtgggcttgtccacacactcatgctgatgtatcggctctgaatggaaccctgaggaaacatacagggaacaaggcatccctttcagcccaagcataagcaactctatcttttcctcacccttctgagggaccaacttagggccaaagtcactgtgctagcaacagcaggggagttctcagtttaccccgattccactctgcactcggtggccacaaagccacagctctgctggcaccaggatgaacatctcatcaagtgtagaggaggggacaggacggccactggcaccatcttgtatctacccactactctatttaattctagtccccctgggaagtgagaactaaggagcctgagggctgaccctgctcattttgggaaaaagtttctgatgatcactcaaaggcaattcaaatgggagtgtcacatagcccaggacagcatccttctctgctccaacaaataagccagatgggaaagatgaggaacacacacacaatgcacaatggatgccattatgtttcactaaaaaattttaaatgagaaactacagaagcagcacaacagtattacatagcaattggaagtacaataaaaaaaaaacattctgagacatgtattttaagtgcgtctcttttacgtatattaagagttactactttgacatggaaatcagcggagcaaacacttcacagtaaaacaaagcctggttcttttctcccaaaacattagttttaaaatggagaaataaaaattgtgtatatttatggtgtacaatatgatgctctgaaatatgtatacattgtagaataggtaccttaagctaattaacatacatatgatctcacatatgtgtggtgagaacacttgaaatatactcttagcaattttcatgtatacaatacattattaactacagttaccatcttgtatactagatatcttgaaaaagcctccaccctccagcacagtggctcatgtctgtaatcccagcattttgggaggccagggtgggagaatggtttgagcccaggagttcaagaccagcctgggcaacacaaggagacctcatctctattaaaaaaaaaaaaaagaaaaaaaagaaagaaaatgtctttaattccaaagcatctgaaaagaaaaagaaaaaaatctatggaatattttttaaccttttagttaaaatggaatattttttaaccttgtagttaaaatggaatattttttaaccttgtagttaaaaaaaagcctaactagtaaatcactgatttaaaaaatcataaatgatgcaaattataattgcttgccacatactatttaaattgtaataaagtaaaattcaaagtagatgtcttttattttccaaaaaaaaaaaaaaagccgtttaagaaattatttttaacatatacaaaatggcagaaatcaaaatgtttgggattcaatataaataataaatgttccaggtaatggttatactaattaccataatttgatcattacatactatatatgcataaactgaaatttcacatgtaccctataaatatgtacaattattgtgtatcaattaagaaatcaatccaataaccaaataaaaatgtttgggattaaggcaaaactacatttagagacaagaacaaagcctgttcctttgtaaggaaagaaaaaggaaaaccatctaagcagcattggccctcatggcccgtggagaccctgaggtgacagtagaaggaggcagtggccatagcctgaggctcccgactcaccagacccagctgtggtgcagaagccatctgcccagacctctgggaagaccacaacattgactccatggcctctgggtccctcctctggcccctctgaagctattacaggcctttctgggcatacctcccctttcaactccacgctgccaacggaagagccaaatctaattacattcctggatctccagccagtgaatcctgatggggttttttacttacttcaggttcaactgattgaatgggatgtctatttacaaaaaggaaagaaaaagtgaacaaaaccacccagagagtataactgttaggggaatttttggccacatcaaaattacccaaatagtccagttaagatagctttatgaagagcatcatgacatcaccccttcccactcccaaacaatccccaagtatcaaattgtcacttataccccatgttccctaacacagcaaatcacatgcctatccaaggaaaaagggaggaacaacagaggggtggctggtcttccagactttgaaagtcaaggctgtcctgaaggaaggtgggtcaaaattacactacaattaggagttagtcagaagtaaggctgggcatttgtaatgggactgagtggattaccacaaagacagataggtttttttgggggcggaattgaaagactttggcctggatggagtagagaaattaaaaaggggaatggctaaggaagatgaaagatagttccagtaaagccaaggtaatcactgaggcagggagggagttcaatcttcctccctccctagagggaaagggtgttttctcccagaaagtcaggatcctcttggcaaacagccttgacaagattaaatctaggaatgtgggctggagaggtgggatagagagtaatattggtgaccaaacctaggacagcaacattttcaagtctgaaagaccttgtggtttcttaggaatcttggagccaggaaagaaataaacaagggctgaaagcacacatccctgcaattaaagaagttgtcagaagaccttctctttatggttaggtgtcctcttccacactggggctgttcacaagcagcaggtcaggcctttaccacaaacataatctccaatggccagccccttcctaagtattactaatgtttccacacttcaagaaaacagctgttctttcttgcccctaagctgctcaggtacagagattctggtcagcgagatgcaatcaggcctatcaattagactcagtttttctctatttccatgctaggcacagtgcacaaatacattttccgtcacaaaaaattgaagttatatttggcatttaaggatctgcttagggatgattcctatcctgggcctgatcacccactggtgcttttgaagttttggaacctctccacccaaagaattctccaggccattctctgcctcatgcactgtgaagtccctacaattcttatattctactggcaagtgtccagctggaatgtcttgcggcctgactttgtttactgtggcctgcgtaaggaggctgtaattcgttgaaggatgttttccattttggttctctctctggagactttctcctacttttcaccctcaacacctaatggcctttgtgaaaaccgggttaaactacaatttgttctacatttcctttaattcccaggcaatcatcttcactcatcagctgcgggagactgagattagtaataaaggtcattgtcaatgtccctaattatcaagcagctactgggcacagcaaaggccgcagcagctctcattcattacctcaaatagccttcacagagaatctaaagttcactgtcattttcatttttagtcttgtaagtccctgactctgtctggggaagaacctgctcagctccaagcaagcaggaattggtagcccttatgtgaggagtttagaaagagtttcatttccctccctatcaaacaatctaagtgttagaaagggctgataagcttcacataaaccatggaaaaacaggaaaactgagtaagtccaacagttaaggaagcttccatgggatccccgcttccaggagatccaagggaggaggaggaaccgcgatcaagtgtgagttgtgtaatctctgagctgtgcaatctccctgtgaggcagtgacactcctctgtccagcttcacactgccagtttgtccagtggcactggaggaagcagcaccaggggcacatttgcacaaaggtgctgtccttcctcccagtataagggagaagtgaaaagactggggcccagcatgactcctagggtccagacatgaattggggagatatttctgcatgtcctgtctactggttcttatggtccttgtgggctgcacaggccagagtggcctctgagctcatcaggtgggtggtctgcaccctcctctctagtcatagaatcccagtggggacccccgaagtatctgcaccaggtccttcaggtgttttttttggagtgcagtggcgcaatcttggctcactgcaacctctgcctcctgggttcaaacgattctcctgcctcagcctcccaagtagctaggattacaagcacacgcccccacacacggctatatttttgtatttttagtagagatggggtttcaccatgttggccaggctggtctcaaactcctgacctcaagtgatctgcctgtctaggcctcccaaagtgttgagattacaagagtgagccaccatgcccagcctctttttcttttttagagacagggtcttactatgtttcccagactggtcttgaactcctgggctcaagtgatccacccatttcagcctcccaaagtgctgggattacaggcttgtggataccaacagcacccgagcacggtcccacagtccaacgcactgtgccgtccttgagcctttagttccagcacaagtctcccggcttcaacccaggttgcatgttctccctgatctccccaggtggcacccaaggatgaggcagtgcaatcttgttgctcacttcccaggaccgacacttacccctaatggcccaagcccatggggcagtgagatcaaagcctcctggagctcatactctctgacaccactggaagtgtgggcttttgcgtctgattaccccggggaaaggttctgaatgtaatcgtggctttggcaataaggtccacaatgcattaagatttttttttttttttggaggaggagtttcactcttgttgcccaggctagagtgcactggcaccatcttggctcactgcaacctccacctcctgggttcaagcgattctcctgctcctgtctcagcctcccaagtagctgggactacagatgtgggccaccacgcccagctaattttttttctatttttagtaaagacaggatttcaccattttggccaggctagtctcgaactcctgacctcaggtgatctgcccacctcggcctcccatggtactgggattgggattacatgcatgagccaccatgcctggcctagggttaatttttatttttggagacggagtctcgctctgtcgccaggctggagtgcagtggcatgatcttggcttactgcaaccttcgcctcctgggttcaagcgattctcctgcctcagccacttgagtagctgggactacaggtgcatgccaccacgcccagctaactttctgtacttttagtagacgcggggtttcacagtgttagccaggaatggtctcaatctcctgacctggtgatccgcccgcctcagcctcccaaagtgctgggattacaggcatgagccaccgtgcccgaccctagggttgactctcatacaaagacagcacgggaagtgaaatgctcttttgtggaaatgaccagaaacaataaaagcggctcctgcctcttcgtctactgtgagggacctcaggatgcagctcccatctggctcgagtgacaaggacagaggggaacagggcttctctgagcacctcagacagctcaggggaccttcttacccacaaacgccttcgttccattttgaagcgacttaggctggcctcaggacctccaacgcttggatttctaggtctcagtcacttgttgccacgcacgtctgagagtaataatcaaaatgctccaaaaagaagaatacatgtataatatttacgaagcaacggcctcctgtgaaaacctccgcaaatactgctgaggaaactgacaactggcgactcaatcccgccctttcagtgcaaatctctggctccaaacctgagcaccagtgtttcctgggctgaaccagggggcaggaggaacaacagaccatgtggttggtcacaagtgacccctgtggtcaaggaccctgactacggtcttgcagcgacatttctgcctctgctcccgccttcctaggacgcctacgccactgcctgggccgtccccaacccccagcaccttcagaggggccgagtcccagagcatccaccgcattacaaatgcgcacccaccctggagagctccaaccacgagcaccgccgcctcggttcaaggcatccttacagccacaactcctcaactggggccaattttccggggcaggcggcccggggtgacccaagtggcgcacattattttctttggtcttcaacccatttccagagagaaaacagggacccgggacaggggtggtgccgggggcacaagcccaaggtcaccctgcggggaagcggaggaatcagggctcgaacttacgtttttcctcagagagttcaccacaccgcgaagttgctggaaggaaagaacgagacaatggctcagctaagcgccctagccgctgcgtggggcggggggggcggcggtgggggccggggggctgggcagcctggtctgaccaatccccgtttctcagtccttccagggcaaaatctcacgagatccagtgaggtcgcccagagagtcgagaggggcttgttttcaaagactgggaggaggaggggcagtgggggaggggcagtggggggaggagcagaggagaagggagcaggaggaggggaaaaggggagaggaagttggagagcagaggaggctgggggtggggagcagatgggggtggggaaggaggggagatgggggtggggaaggggggcgggaggagggttaggaatgggggaaggaagacagggtgggggaggggtgggcatgggggaaggaagacagggtgggggaggggtgggcatggggaaagggagacagggtgggggaggggtgggcatgggggaagggagacagggtgggggaggggtgggcatgcgggaagggagacagggtggggaaccgagaagaaagacagtggggggggatggaggaaggaacacagggtggggtggggggtcgggatgggggaagggaaacaaagagtggtggaggcgtggggattaggaacggagacagagggtgggggaggggtggggtgggggaagggagacagggtgggggaggggtgaggatggcggaaggtagacaaggcgggggaggggtggggatgggggaagggagacagaagggggggaggggtggggatgggggaagggagacagaaggcgggccagggcgggaatgggggaagggaaacagggtgggggtggggatgagagaagacagaggttgggggaggggtggggatgtgtaagaaaaacaaagggttggggagggggagggaaaagaggcagagagtgggggagggggtggggatgtggaaagaaagtcagaaggtggggggtgaggggtggggatgggtgaatacgtgatggctgcggcctttcccaccagacagtagggtgggggcagggtggaaaaagggggtgcggtgggcgaatggggaggcggggggctgactgggagtgtgggacggggtgttctgggatcacggagacgtccaagtctggactctgtcctgggtctgtgcttctggcgacctcccttttcttcagtgggatgcggggtgcaggggccggttccaggtcccctgagctcaagtctcgccccaccccgccccgcaagtctagaaaagatgcccctgcccttggctgggtaatctctggatttacctactgtctgtaaccccccgggctgaagagaccaccccccgggagtcaattaacttactctctggagcgcgcgttcctccctgctcccaggagtcggtttcccaaaactttctgaggcccgcgcatgctcccctcgactccccgtgtttccactctccacagaaatccacgcattcacgcccctcccctcccccgagcctgcagaggactccgccctgctttccctacattcagggctgctccttttgtcgccaatacaaacctgttgacaggtcacgcctgggaagcgggtggggtgtcccggagcggtgctgaggcgctgcaggcccggcttctggctgcgggggagctgtaccctgaagcctcgccggaactcgcgtctggggccagcagggggcactagagtcaacagggactgtatgcaaaacccacttcctcccaggccctctagggggatggtcaggcttctgcagagatggggaggatcctttcctggtaaggggagagggacgggctaggagccaagcggaaggaccccgtgttcaaggcccttcaagggacgggacaggcgaggaatctctttgagtcttttgaattgttttatcagtcaggcctgggaagtactccgcctccacaaactctgttttcctgaaaggggtcgggggggggaccccaacatctcctgccacaggctatgatgggcatggtggctaagagcaacaggccgcgtggtgaggctggctttttgtggctctgccctgccattccccgaggcatccccatgccagtgaacagagctgcgggttcccagctgcacagatgaatgcacgaacaaaacataggtccatacaaaggaagtcattgcattgatccagattcgacctgggattgtcgcataaaacagggctgataaaaaccgtcgtgttttcaccctggaaacagagactcagcctccccctctttgcttgaggcattcagcaaaggtttgtccttgagtggctgtggatgctcaaggacttacgatttctgactttataaagtttagggtgaaaacaaaaaacaaaataaggagaccattgttttaaagtggccgttgtagctaattatctcaagaaagcaaacaggctggtactgaaagttacacaggcgggcggctccctgggagggttgcccagctctccttttctgagacctgagcagggagcagccagaggagcttgaagggatggtgttcagggcatgggaacaggctgcacacatcttcacggagtacggtgcttgtccagtttgagaagggaaagaaacgggagcagagggctgatgagaaggcagcagatggatagtgcgggattgaaaaggggatccatttgaagactggccaccattatttattttcatcatctgattgctgttgctccattgagatcgatgcgtggagaacaagttggggagtggaacaaatggcagggaggggagagaagtgagtgaacatgaccctggtccagcctcataggacagagcgtggtcatgaagtccacagaggaggacaggtagggaggaatcatggcatggccaggttgtagggcaagaggcagagaggagagaggattgtggaggatgcctgcggagtgccgactgtcagtcgaggctggtcctttatttatttattttttttttttgagacggagtctcgctcttgcccaggctggagtgcagtggcgcgatctcggctcactgcaagctccgcctcccgggttcatgccattctctcgcctcagcctcccaagtactgggactacaggtgcccgctaccatgcctggctaatttttttgtttttaatagagacagggtttcacgtgttagccaggatggtcttgatctcctgaactcatgatccgcccacctcggcctcccaaagtgctgggattgcaggcatcagccactgtgcctggccaaggctggtcctttcttttatggcgatgggtgtttgaaagttgcacataccaaaataaactcactatttgttgacccaaagtaaaaccctgagggtatgaaagggaagggctcatgcttacatggctgagataaaagctgtctcaggaagctgggtgtggtggctcacccctgtaatcccagcactttgggaggccaaggttggaggatcccctgaggccaggaattgaagactagcctgagtgatatagcaagaccccatctatatttttaaaaagggttggctgtctcgggacttttcgaaatagccctgcaagacattcctgttttggaatcacaacaatttagataagatgcttttgaaagaacacctgcctaggcacagcgtctccaccaatgaactgatgccaactgtggttttgagtcttcataaccggtgaactgtttgcaagcagcttatttaaatctctttttttgccaatacaaccttccctttgccctcccctcttgagatgcatatatggcttgccatagctgagcatcttaggttataatgctttttctcttttttaatttttttttgtaaatttatatttatttttatatttatttattttttgagacagggtcttgctttgtcacccaggctggagtgtagtgcataatcgtagttcaccactgcctccaactctcgggctcaagcagtcctcccacctcagcctcctgagtagctaagacaacaggcatgcaccaccatgcccagctaatttatgtatttactttattaaaaattttttttttttggtagagagagtctcactgtgtttcccaggctgggcttgaactccaggcctcaagtgttgctcccaactcgacttcccaaagtgctgggattacaggcatgagccaccatgcccagcgtataattttgtattctaattcctgaataaattcaacaaatttggaggtgttttttgtctgatggttccttttggtcgacaactggaatgggagaggaacagtgtgagggcaaacatcaagtgctttgctgagctccgggtgctttttttggataagacacagaaaatacaataagatgtctgtaatgtttgatttttttccaggtttcttgaggtataattgacaaataaaaattgtatggattcaaggtgtacaattcatatacattgatccacatataccttgtttgatgattaatcaaattagttaacacatctttcaccccagcagtcaatgtgtgtgtgctctgttagcaaatttcaattaataatatagcattattaactatagttactatgctgtatattagagtctcaggatttaccatcttataactaaaattttgtagcctttgaccaacatctctcattcctcccacccacagcccctgggaactaccattctactctgcctctatgagttccactttttgtgtttcttttttccctttcctttaattttttttgtatttgttatattaccaaaccatgtcaaaagagttccactttttagattccacatattattagctcgtacagtatttgtctttctgcatctggcttatttcacttaacataatttcctccaggttcattcgtattgttgcaaatggcaagattcccttcttttttatgactgatgatgtctgtctgcaatatttgaaaaaaaaatgcagatcacgtgaatgattgtctaatgtaattctattcatgtaaaattgtgtatgaccataacagtcactcattcattgcttcgagttctttacaatcggatgccatattcctggggctctgctaggcctgaaatggggagtaggagttacaaggttcctgggatatcagtaattcatatttgtgaatgtcttagataagtgggctaacatgtacagaaaatggtcactaaaatgataacactgtttgttataaaatacttttctgtattctcttgaactttttttttttatcatttattagactgcttcagctgccataacaaaatatcacagactggatggattaaacaacaaaaatttatttctcacagttctggaggctgggaagtccaagatcaaggtgtcagcaaggtgggtgtcattctgaggcatcttctcttagcttataggctgaggccattttgcgttgtgctcacgtgacccctttgtgcgcatgtgtggagagagagcatgggtgcttcttcttataaggatgctgaaagttatgagaacccgacccttgtgacttcacttaatcttaattacttccttagaggccccatctccatatacagccacaatggggattagggcttcaacatatgaatttgtggtggggggacgcaaacactcagttcataaacatatgatttttttttccttgatcggcaatgaaaatagaggtatcttcattttggaaagtgagagtcaacctgtgctgaattagagtgatgacaagagatactttaagactgcaatgagggaagcaagggatggggacgcatttgacagtctgttctgctgtgctcctggaagtgagagaggctgagtcgggactaacctttgcacggatgagatagagaactgagagagaaaagtatgtatttttctatgaccacctaaaataaacctggagttgaagggaccagcactctcaacctaaccattctgggaataaaaatcatagagacctcgctgattaatggaaacaatttgcctttcgattttctaagcaggtgaatgcaaggagtttgtgaactttactgctgttttcgtgtttttttaggtgaagacactgacagtaagaaaaggcaaaccacaggtccaagacaaagtggtcaagtcaagaaggaactcaggctgtgtagtcctggtgcaaggctccttgcccccagcgtggggtcacactggctggctgtgctcccacgacacttagtgcatactgggctcctgacttaataacacgtgtttgaaatggcccctgattcccaatctgctgcaggattctgcagatgcgcaacaggccacagtggaaggtcttggagagaattcagagtggcttgcctacgttcccatgaccgtttgtcctaatgggagaatcaccattttggaaaattcttttggaggccaggcgcggtggctcatgcctgtaatttcagcactttgggaggctgaggcaggcagatcacctgaggtcagaagttcgagaccagcctgggcaacatagtgaaaccccatctctactaaaaatacaaaacttagcctggcatggtggtgcacacctgtagtcccagctacccgggaggctgaggcaagagaatcgcttgaacctgggaggcagagattgcagtgagccaagattgcaccactgcactccagtctgggcaacagagtgagactctgtcttaaaaaaaaattcttttggggctagctgtgaatgagctcagagggaaaggcaggagccttcaggtagggagcagcatgattccaccccagattcaggcctcctgggtgtacagagggcaggaggatcctccccaggtatgtgagaggaagggaagatgaggtgtttgggtcagtgaacacactagaaatccaggtgctcactgatggattgtgcttggcatctctgttctgccaatccagcctcaaagcaactttggaagaggatttatgcgcttcacacgcttccagcttgggccagagcatctgcacactcccctgggtataggcctccagggcttggagcaacggaagagctaagaattgtcagtgctcaggaggcagattttcagggaggatcctcttgcatctcaggacatggaaagggctaacagagccttaagtgtcctgtcccagtgctggggtctcagaaggcagctctggggcatctccaccatggtctgacttctgctgcttgaaaccattctccctcacggcacaggcaagagtcctcaaggaagagcacctgggcacctgggttgactcttcctctctccaggtggagagaaccagtagagtttacctggggtcatgctctgagttaatccccctctgcatttctttctcttctcaggggcctgggctcagccttgactcagccttcctcagtgtctgggacttggggtaaacagtcaccatcttctgcactggaagcagcagtgacattgagggttctaaccatatctcttcgtacctacagtgcccaggaactggccccacactcctcatttattatgtccattctcaacccttagggggtcccagcttgattttcagtctctaggtctggcaacacggccttcctggccgtctttggcctctagcctgaagatgggcctgacagtcactgtttgttctgggacaaccatagcatttttacccacatgtgctccaagtccacggggaacagagaccaaatctgccatgagtgaccagtgtcacagggcttcacaccagtcaggcagtcagatggtggtgtttgctttcatttctgctcatcatcccaagggggtggacgcttcaggaatgggaccctatgcaactctcattgctctttataatgatgtgggaaagagaaaccatctcccaggggacttggctttgcaaaaatgaaaataaaagctccctcctccctctgtgcagtgaatggcctctgaatgcagacttggtctccctcttcagtggcaaggttggaggaagaacaacagcttcttattgcactgagacaactcaggggccacctcatttgaagatgtgcatcagtgtgagcccaggtattcctgtactcaatgatcgaggtctctctccttaccttgtctccacctggatctgaccaaagtgactgagatgatccaggttctagttttctcttgctgtgtaacaaatttctgcaaacctagcaccttaaaataacacccatttatgatctcccagttttcctggatcaggagtctgggatcagcttagctgagtcatctgttcagggtcttcccaacctgaaatcagggcattagcttggctgtgttttcatctggaggctcaactgaggaagattctgtttccaaacttactggcagaactcacttccttgctgctatatgactgaagccaaggttttggggggctatttgccgtcagtgcccgaagctcctagagttcctagaggtcacccatagctcttttgccatttaatgtaacctaatgaaaagagagatattccatcacctttgccatatttattggttagaagcaaatcacaggttcttcttgaattcaagtgaagagattgtgcaagggtatgactcatttggggtcaccatagggtacatcctcagtaattgtgtgcagtcaggactaggggaggagattctaattatacagagaagacttgtgccttctattcagaagttaagaagacatcctttactttttaagacactctgtcattttattcattgatttttagtggtgttctagaaagcagattttccaagcgtaaagcacaataatgaaatggcagagctgatgacagttcagatgctattagatgggtgtgcagatctaggtttagagccaagggatggagtagtgtctcttggtctccactgtggagaggccccttgggaaaacccaccacccccatttctcctcactccctgcctggacccatggtctctgcttggtctggcctatgctattaaaaatatacttcaatgatgatacttatgtcttgtgtttctctacactctttgtctatttgcagtggacagcacactgcatgctgatatcaaaaattattccagcaaattcaaaaataagacagtaaaaagaaataaaagacagttttacaatggaagagacagaaatgaatagttgcacttatgtttgatttagctgttaaatctaagagaaccaactgcgaatgagtagagaaagcggtcgttgctgcatactgaccattactagtgtgagatactgggggagctaggatggcctcctcttcctcttccttctcttgcctctcctcttctttcttttttggtaaatatctttcctagatcagcggttctcaaaactttcggtctcatgacctaatcacctcccagaggccctacctccaaataccatcacattaggggttaggtttcaacatatgaattttggggggacacgaatatttagtctagaatgctttttcaagaaaaggaggacagaaagatcatactacagtggcttttaaaaattagatatggacagcttttgtttctggaatatgtcagtgtgctgttgtgcaaagcatcccgggaacaacacctcagaatgtttcctttctgtgcctcagtaagacttgaaggctggtagggtagcctgagtcgtggctttcaatgatattcaggtcctaattcctgggacttgtgaatactgcctgtctttgtccgttttgcattgctgtaaaggaataaccgagtctgggttatttataaagaaaagagttttatttggctcagggttctgcagactgtacaagaagcatggtgcccacatctgtttctggtaaggacctcagaaagctttcaatcttggtggaagggggaggaggcatcacatggcaaaaggcagaacaagagggagaggagaggtgccacattcttttaaacaaccagctctctcatgaatgaactcactgatctccacagggagggcaccaagctattcacgagggatttgcccccatgaccccaaaacttcccaccttctttttctttttcttttttttcttttctttttttttttggagtctcgctctgtcacccaggctggagtgcagtggcgtgatctcagctcactgcaagctccaccttcccggttcacgccattctcccacctccctagtagctgggactacaggcacccgccaccacacccggctaattttgtttttgtatttttagtagagacggggtttcaccgtgttagccaggatcattctttttctttttcttaacctctgggagcacagaacataacataggatttggaggggacaaatatccaagctatatcattactttatatgagaaaaggggttttgcagatgtaattaaggatcttgagggagacattatactggattatgcaatgggccctaaatgtagtcacagatgtcctttcgagagggaggcagggggagatttgaggacagaaaaggagacatgaacagcggtgggatgatgcagctacaagccaagcaatgccagcagtatctagcagctggaagagtcaaggaaacagattctcccctgggacctccagaaggaaccagtcctgctgataattttatttcagttctgtaagccttcttttggattttagattctcagaactgcaagaaaataaattgctgttattctaagcccctaagtttttgacaacttgttgtagcaacaatgggaatctgatatagctaaggtaccatacattttgacatcttctctatatatggtaccattctgatttgtactgtgcaaggcttccttgccctctcactggtaaaccttggtatgcaggaaattatttttgtacattctccagtatattaactttggttataggtgatacattatatctattgcaaattatcattttgtctcctaatttgcatcaaccatgctgcttgtgtctatttatgactgattgtgtaggaaaattcttcaagaaaaaatcaaataggatggtaattcctgcatcttggaatgcctaaaaatcttctggcaataactgattacatagagaaaccatctgtttacttccttcaggaactacctggcaccttctagtgctttcccttgtggaccacaggtgatggaggctgggccctaatccagcacacacctccagtctagcgggcttctggtccagttatttacctacaggtattttattgatgttattcttcctctgatgacacgctgatttcaaaacatgcctaaaaccaaagacacaggatctttgaagtcccttccctcaaatatctgaggcttttccccaattgagcagcagttcacatgcttgtaagttttaaatgtgttaggcattttactggaaatgctttatatgcttcacactccacaggacttcttattcccagctcattgattgaggaaagtgaaatctgccatttgctgatgggccaatgtcaaggccaatgtcccagatcccctgtcaggacaaaagtgtgatgcagccagaagtcagccctcacctgcaaatgctctcctgaacttgcctaccctggagggatctgctcaccaggcagattccaggcgatgcccaaagcactccctaataaaactctgtgtgctcatctccgccttaacttctgtttccaggagacccagcttgtgaccattgtttccaggaagattaccaattgtctctgtttgccctggaccgaaggttttcccaggacatagatctttcagtgctaaaacaggacagtcctgagttatcttaggaccaggaatgtctatgaaaggagacacttgagagatgggattctggagccatggagaccccaatatgggggagttggaggtaggggcgcgagggtagatgcgcatatagcccctaccatggtggagcaatgcagtgtgtaaactttttaccagtggtgaatagggatgatttacctataggaggaaatgaaaaagcaggaccatgagtcagacatttgagagacgtgaagaaaacagaacattaaaggaaccaattccacagctttctctgttggaacagtgtggtagtactgatactaagtgtgattgatgatttgcaacagataaaatgctggaatgattaattagcaatgaaaaactagaagatgtggggcaacaaggctccagctccatcctcttagggtaccagctgggctcaagaattgacataaaacagattcgcaggagacaaaacatacaaatttacttaatacaagtttcacatggcacaggagccctcacaaggaaatgaagacccaaagaagcagttagagtcagttacttatataaggaattggtcaaagaatagtcagttgtgaagaaacgactaaaatatgtggggaaaaaagccccagaatctggtgtatccaaataggactccactctgatgacaggtttcttgggctgagattcctttgagccccatccaacttcttcccagctgctgagaagagaaaatcttttagaggcttcctggaattttcccagtccacactgattttgcttaaaagataaaagttattataataaggtctgttcagcagtatctcagttttgacttctcatccctgaggataagaatgttgcttttccttctagcatagggagggacagggtttttcacatgggacttttgtcttctgcttttaagaaacagaaaacagcagaatgatctttttgcaactggtgttttcaagtgccttttacttaaatagtcaatttgctagaccggtacttttttatttcttttcttttttttttattatactttaagttttagggtacatgtgcacaacatgcaggttagttacatatgtatacatgtgccatgttggtgtgctgcacccatcaactcgtcatttaacaccaggtatatctcctaatgctatccctcccccctccccccacaacaggccccagtgtgtgatgttcccccactgtgtccatgtgttctcattgttcaattcccacctatgagtgagaacatgcggtgtttggtttttcgtccttgtgacagtttgctgagaatgatggtttccagcttcatccatgtccctacaaaggacatgaactcatcaatttttatggctgcatagtgttccatggtgtatatgtgccacattttgttaatccatagactggtacatttttaactccatcagagcgcaagccaaaaagcttcctcctgggctgaaaaaaaaagcttccccctgggctgaaaaaaagcttcatcttgggctggaaaagctttttggcttgcactcttcctctgggcctgagccttccctgccctctcatctgcttggacagagggcagggaagactgaagcccagaacttaatcctaagtgtagcagaccatcgggaccctgacagggtaacagtggggtactgagtcacgggacgaggccatctggattcacgcacctgaaaatcttgatgtccttgaattttccaaacctgcagaagtggccctcccttactcattgaaacccatgtctcccttccttttgcctgaagatgatgcagagacctctgacctgtgagattgtatccaccaccacaagtgtccccagaaatctgccaccacctcctattaagaccaaaggaccaataactagaattgagtcccaaagaaacctggcaaggaatgtgatagacctgctgcagaactaaggagctgcagaactaaggagctccagaaccagccaacacgtgcagtgggccccaggcgagtgtgtatggggctggattctgagggtgtaagatcaaagtgcaaaacctaagattggattggggagggtttatctgctggaagcactctcctgggacgcaggctttaaccccctagcaaagacattgaggcattctgcaagcccgccgcaaggattgcccttaggaggacagagaaagcaatggtccgtaccaagcaaggtcataatgccagatgtgctgtggcagatggtgggagaggaatcaaaaggtcctgggaggccaggtgtggtggcttatgcctgtaatcccggcaccttgggaggccactgtgggagaatggcttgaggctaggagatcaagaccagcctgggcaatatagtgagaccctttctgtacaaaagattaaaaaaaattagtcaggcatggtggcacactcctgtagtcccagctactagggagtctgaggtaggaggattgcttcagcctggggagtttaagactgtagccagctgttccagcctgggcgacagagtgagaccctgaaaaaaagaaagaaagagagagaaagagagagagagagaaagaaagagagagatggagagaaagaaaggaaggaaggaaggggaagggaagggaggaagggaaggaaggagagaaagaaaaaagaaaagaaagaaagagagagggagaaagagagaaaggaaggaagggagagagagagggaaagaaggaaagaaaagaaaagaaagaaagagagagagagagagaagggttctgagagtgcttagctggaaaggcaataccaggtactcatggacatctccccaagtgagagaattctcaggagggcctggggactgcagtctgtaattgattgataagcggtgcactggtgagagaaatccagcatccttgagaaactcagtgggtagttctctagaccaggccagcaggggaagctggtaaggaagttgatagcaatacggatggaaggaccatgcagtgatagtgtcacattgtcagggcttaagcataggagccaggtgtgtggcaaaagatgaagtggcagcaaggcacctgacattgaatgatggagtcagtcagtatagcatggcacctctcggggcaagatgcataagccaccaagaaagggacagcttctaatctttttagcttattttttatttttttgttgagatgggggggtctcactaggttatccagagtagtctcgaactcctggcctcaagtgatcctcctgcctcagcctcccaaattgctgggattacaggtatgagccatagcttccggcctagcttttaatctatattttcagagggaagtaaggaagaagggtcaaaccccattaacaagtttctgaaagagcctaacttgcaatgtctagtcattccagagtaggatatttaccccaaggattaattcactgtagttgctgtgataaatgaccaaaccataaactgagtgactaaaaacaaagacctctaaatgattacacctggtatctttggaggagccattcaatctactatacgctgcttccaagtccttgtagaaaaacatacggaaatcatgcatcatcccatgggtggaagacctcgctccaggttagtgaactgctctgatttgtgactccaaagatggacattggtgacagcaaaaggaggacccagaatctcgtgtattcaaacagaactccactctcatgagaggtccttggatctagacccttgggtcaagcttcctctgagcattgtccaacatcttcccacttgctgagaaggaagattctttatgtgggccctggaatagcctcagtccagcctgatctctctctcttccctcctgaagttttatttcaaacattttgagactctaaaagggtttctttgtctcatttctctcctccagtcctactaccagggttgtcttcaatttatatccaatgtttctctggcctggaactgagacctacctcccaagcagcgacccgacccgtggagtggggtccctggggcaagcgaatggtcctttgcctggagaacctgggccagcagtcatggcaggtgacacattccattctggggcgaggaaccagggagggagcactgcatagatcagaagggtaaacaaggggagggagaaggagcaaacttagatttgggagggaaagagggaagggtgcagaggaagcagaacacggatgactgggcctccttcagttgttcttgtgactagaccctcccatctaagccaccaggggacaggaagggtatgagtttgaggactctaatggccccaaggtactactgtggtttatcctacttgtaggcggtcccaagagctttgttctctccagggactcaaaggggatgaacttgcaagtcttttgtctccactcagtgccttctctgattaggccaataaacatccccaggcctcagtctcaggccactgtaggggctgaggacagtgagaaagatgtgtgagcatccaccctttggagaggttgagtaggaatgagaggtcccctgccttgcctttggtccttgtgaaggaagatgttggatatttcccagcttggctggaatccgttcctcaccctccccattcagagcagggatgagtaagtcctccgctttctccgcaaccacaattgtgtttttcaggaaaggataaagtgggaaagatcagatcccatgcctcttcctcctctaagtcatgggatgactgcagagagtgagcaagagggtaaaaacagtgcactgagtgtgatgtttgctaaaggaacagataattgcatcaaaacctatttctagcagagttgtggtgcttgcctataatcccagctactaaggaggctgaggctggaggattgtgaggccgggagctcaagaccagcatgggtagcatagtgagagctcatctctaaaaaacaaaacaaaaaaccacacttatttctaattgtctaattggtatccactatcagacctttctgggaagttttttttctaacatgcctaaatgtggcttggagactgtttgggtgaggccaatagcttagccttcctacttaagttgtctccttcattcattcaacaagcaggtattattgagtggattgttgggtgcatttgtgtgtcctcagtaggatgcaggcatgcaatacatgaagatatgataattccagtcagaggaatggcctgtgcaaaggccctgaggtagagagaaccttgataattgaaagaacagaaagaaatccagtgggactggggaaagagaggaaggagatgagaggggagttacaggcagccaacagatcatgtgcagacagatcacttgaaagcagaggcaaatggctggatgtttttgttaatgaaaagagaatttatttgaagatcttccatcatttttacatgaagtgattgatgtgttaaatgaatgaaatttaacattcatggtgtatgaaatttatggaagaaaaactgaagcaggcagagcattttatggcctttgggcacaagagagtgaagcttgtcccatgtagagtcatggagagtgactgggagattcaccattagagttggcagattggctcttggattgaatatggggcatgaagcaaagagttgttgactcctggaagtttgactttgtcaatggcgtggctactactttcttttattaagagagagacagatgggagagcaacaggtttgagggaaacacataaagtgctttgtttggactcatggggattttttggagaagacagacaagatacaagtaacaagatgatgatgtctgtaatatttgggtacaaaatgcaattcataaacctgattgtataatatgatcctatttatgtaaaatcatatatatttagttaccttgattcaatttatacatcactaattgtttccagtaatattaaccaaaggtctactatatgccaaataaccttttatggctagagatagaaaaatgaacaaaacttactatgttcatccttatggaagatacataattcatatttgtaaacatcacatttaagtatggcaagaaatctggtgggatggttcctaaaatgaaacaatagtttcataggtttgtgagaatttaggtgatatttctacttaactttcatgtacactaaaaatttttcctataactcaaaaaaattttttggaggcagattagcaagatatttattttggaaaagcaagagtcaatctgaattgaactggagggatgctgagagttctagaacttcatagagagaaagaaaactgagttattgggtgggggttacacctatctttttgtcttttcttttctttctttcttttttttgagacagggtctccctctctcactcaggctgaagtgcagtggtatgatcttggctcactgcaacctctgcctccctagtagctgggaccaccacaggcatgcaccaccatgtccggctaatttttaaaatttttttggtagagacagagttttgccatgttgcccaggctggtctcagactcctggactcaagagatccgcccaccttggcctcccaaagtgctgggattacaggcgtgaaccactgcgttgggccgcttatcactttaatgtctaatgagaggcccctggagctggaacccttagccccagcctgacccctgacccttctcccatgtcctcaaattcaaaaactcacctctggctgtccattcagttgttctcaagtctgactgtgctctttgtccttcatgaactagaactagtctttctttcaaaccattttgatgagctgatcaatgtctcctcataccatttttctcattcagccttcctcctggggttggttttatttaccatctaacaatatttctgtaaccctgagcctctagagctgcctcaggtgcactaacgctgtgactaggctgccctgggacaagctaagaggttctgcgggggagggtctgggcccctggtgtggcagaaggtgcatccatcctggaggaagccagaggaccaagggccaggagcctgggggggattagaagggaccaggaggcctggtcctgagctgggatgggaaggaacgggaaggggcaggagcaggacagggatttccagatccactcagccgcctccctggggcttgggctcctccatctgaggccaccagggggcggcaagggcttggatttggggaagggaattgctgtggtttaaccagggagtgtatgaagctccatgggctgcttcctcctgagacccttctaagggagaagtggggagtggaatgtccaaaatatgttgtgtcccaatatgttcgtttctagaaaggctaataaatagcctcagcccccagcctcagagcactgcatagaaagaggacagaggtatttgagggtcattctgagagaacctagaaggtattgagtgggaataaacagtccccagctctgcctttggtccctgggaaacagagtgcctggatcactccacagtggtcatctgggatctggtccgaggtctcttccttgattctgttccctgagccttttttattctattttggatcagatccatgcacacgtagctcagagttgtgcccaagatttcataaggaatttacagggttttttccccctcaaacttatttctctccacagtctgcccattatttatggttccccagactttcccttttggtcttctggtgaaaaaactgtgactttaataagcctgcggtgctgtgcacttcctgcaactgagtccgtgtccacaccaaacaccaagaggacaaagagtaacaaaggtaaggggattaagtgccactgtcttggaaatcagctccaaagatgagaaaagaaagtccgcacagtctctactgtccctgctgtcaccacgaagaatttcctggaggctggatcatgtagaatggagagaagaacaaacataagaaaaggaaaacgtggacatttcaaatttgccctgagcactaggggtttcctttctcatcttcaagccagaacagtggagcttcttctggaacttttgtggctgcacactggtaccccttccaggtattggtctgccctgagtgcaggccacaggacactgggggaaaatgggaagctctctgctggtttgattttactaaaagtgctagtatctcccctagtctgcctccagtgatttgcttttccaagtaatcaaattgatgctccatggattctgtcccaggttttacagctgggcttggagaaaatgtggtatatgccactgcatccgaaatggaacctgaaaacagtaataatattctaaacgtgaaaattaaatcaatctgaatcacaggcagtggaaaacatcaaaagatgaaagagttttaaaagtgatttgaggaaagaaacagggagaaatattttcacattggttctatgtttactctatttatcttttttaatttaattttaaaaatagagatgaggaggtctcactatgttgcccagccaggctggtctcgaactcctgggctcaagcaattcacccgcctcagcctcccaaggtgatggattacaggcatgagccaccacacccggcccctgtgtttcttatgtgctccttgattaagaagagttgttttttgtttttgtttttgttttttgttttcttgagatggagtttcacttttgttgcccaggctggagtgcaatggtgcaatctcggctcactacaacctctgcctcccaggttcaagcgattctcctgcctcagcctcccaagtagctggattacaggcgtgcaccactacaccagctaattttttgtattcagtagagacggggtttcaccatcttggtcaggctggtctgaaactcttgacttcaggtgatccacctacctcggcctcccaaagtgctgtgattacaggggtgagccaccatgcccggccaaaaagttggtttattgtagcttgtggatacagtgagatggaagaaaacccagaaagcagaaataacacttctttgtaatatgaggaaaaaaataaaagataaagttgaatgaaatatttcatatatatatgtttcatatacatgtttcttatatatgtttcatatacatgtttcatatatatgtttcatatacatttcatatatatgtttcatatacatttcatatatatgtttcatatacatttcatatatatgtttcatatacatttcatatatatgtttcatatatatattgcaacatatatatgcaatattcatatatatagccatatatatgtttcatatatatattgcatatatatgtttcatatatgtttcatacatatgtttcatatatatatagttttttacagagtcttgctctcttgctctgtcacccaggctggagtgcagtggcctaatcttggctcactgcaacctctgcctcccgggttccagtgattctcctgcctcagtctcccgagtagctgggattacaggaacgcaccaccatgcctggctaatttttgtatttttagtaaaagtggagttttgccatgttggccagtctggtcttgaactcctgccctcaagcgatcctcctgcctcagtgtcccaaactgctgggataacaggcgtgagctatcacgctcggtctgaaatctttagataagtatgaagtctatataaaaaaaaaaggctcttactaggctagaaatggcccattttagaagctttcattttccacctcacactcatctctctatagatcctctgcttgggcagtgggtggaccttgtggtcctcagttctcaggctgagaaccagaggctgaaaaggacaagtcacctgctcatgagtgggaagggcaggattgggagcagcggactgtggctccattgctccttgtttcctccacaggcccctcccacgtgtgcccctgaatgacctagaatgactaatgtgctcaagggatttgatgctgcagatgcttcggcatgaagggtgggggtggggatgggacaaggctgcagctgaagagatgggagaccaacaacacacagcaggggtttccatggggtgggcacccccatttcctcacagtttagagagcctggaggtgggtgccaagcagagggcaccatggcgtggcccaggcctggaggttcacagagacacaggcacaacacagcagagacactgagggccaggagctcactcagatgagggacttcagcagatctttctctcttgaggaaattaggtacaaaggaatcaagttcctaccatcagaatagacaacaagttttaatctcctcagctgagccccgctgtcgagggaagcagaagtctctgagcccggcccaggtgagagtggggtgaggagaggagctcagggtgcagatttgcatgaaggccccaccctcctctgaggcagaggggataagacaagtctgggggtaggcccagcgctggggtctcaggaggcagcgctctctcgggacgtctccaccatggcctgggctctgctccttctcaccctcctcactcagggcacaggtgacgcctccagggaaggggccttggggacctctgggctgatctttggtctcctgctcctcagactcacctgggcccagcactgactcaccagagtgtatttctccctctttccagggtcctgggcccagtctgttctgactcagcctcgctcagtgtccaggtctcctggacagtaggttactatcttctgcactggaaccagcagtgacattgggggttatgaccttgtctcctggtgccagtagcacccaggcaaagcccccaaactcatgatttatgatgtcgctaattggccctcaggggcccctggttgcttctctggctccaagtctggcaacacggcctccctgaccatctctgggctccaggctgaggacgaggctgattattactgcagctcatatgcaggcagctacaatttccacagtggtccaagttcatgcgtaatgagaccaaaacctgccctggtctctcaggctctctctcgctatgaaggtgcttccttaccctgtgcagaagagggtttcatgcaacatggccttgagaatttcatccactctcagcccctctcccctccaacaatgaaatgcaaaagaaacatgctctctggttaattgtctagggacaatggcagcttcttcttttcctgtgtgatatggtcctgcatggtgactctttccaacttttcaatggcagggacagagcaataggatccatctgctcagtaccatttctgcagttttctatgaaaccctcacattaaatgcctccatctcccacactgtgctgactggcctgggtctgtgctccagaaataacgtcttactcaactccatatccaccacgctgtagtaaggatggctgtctttgctgggttatttgttcctctgcaggtctcttcccaaagcaacaccaactgagagaagatctgaagatgttgagagagtgagcataaaagtaaagggttttatttatttgctttcttttttttttaactttgtttttatttatttttttgatacagagttttgctcttgttgcccaggctggagtgcaatggtgcaatctcagctcactgcaccctctgcctcccgggttcaagcgattctcctgcctcagcctcctgagtagctgggactacaggcacgcgccaccatgcccagctaatgtagagatggggtttcaccatgttggcctggctggtcttgaactcctggcctcaggtgatctgcccacctcagcctcccgaagtgctggcattacagacatgagctaccatgcctggccttgtttttattttttagagttcctttgtctttgacccgatgtctatctatgggggcttagccagggcacatttgagtgattgttctttgcgagaacattgttctttgcagatcattaaacccctgtcctggaaacagtcctgtacttagactgtctccctgttagcatgggctctttcctaaatgatccacaggaaagcttatttggtggatgggtcttctgttcctcaaggactctatgggtagtttattttcaaggtgagccaatactgtttctagctggaatctcatttaatctcataaccatgagaattaattttttaaacctgcagggtgttctctagccattttttaattttctttgattttgtgagccacttttaaattataatcatcattaaaccttaaaacatataaacttcaattaagcagattatatattttattttattttttgagacagagtctcggtctgttgcccaggctggagtgcagtggcacaatcttggctcgctgcaaactctgactcccgggttcaagtgattttcgtgcctcagcctcccgagtagctggaattacaggcatgtgccatcacgcctagctaatttttgcatttttagtagagacggggtttcaccgtgttggccaggctggtctcgaacttctgacctcgtgatccacccgcctcggtctcccgaagtgctgggattacaggcatgagccatcaagaccagccacatatttttaaaaagtacattggttattatccacatacctttggactgctataacacaataccttaaactggtggcttataaaaacagaaatgtatttcttacactcgtggaggctgggaagtcttaagatcaatgtgctggcagatttggtgtctaatgactgtctgcttcctcatagaggccattttctcactgtgtccttggaactgaggacaaagcagctcctggtaaagttcagatgtctgtttcttgcaggaaaatttctctttacagtgatctgggctactggctccaacacacgcacccagatggatttctgagccggtcattgaccattaccattttaatattatctcaaattataaacattatctcaactattgtttaatataatatagcacataaatgtttaaagcatacatagcgaaacaagggtcttacattcaaaactgtcatttccccaatcacccatctccttgtccaccaagccccagtgccaccacttagctcattgctcctttggcttcactttctggtgctcttgcaagtgtctgtcatgtgttacaaacaacaacaaatagtcctccaagaacgtttacctccatagaatccctatcctgtttcctgagtggacatttccatttttaatctggcaaagatcagtcagccctgattagtgttttaaactcatatccatctctttctagaaaaacacactaggttaagcatctctctgtggatgggggaccctcatgaaggcacacagctctgagctgaggtggcctcaatgtgtacaatggagcaagacaaagaaaagtcccatgttctgtgtgatagacagacaggcactgatgagaggtctccagagctggcgcccttagtctaatcttgactctagtcctcgtctttccgacccttaaacactagaattcctggtctgcattccattaggtcattcttaaatctagtgagctgtatctccttcatgcaatgtttttctttcactattattttcagctttattgacatataattgacaaataaaaattctatatatttatggtatacaacttgatatattaatacatttgttgtacattgatatatttgttgtgaaattactgcaataattgtgtgaaatcacaatcaatctaattcacataaaataaccttacataattatcatcttctttcttttttttttttttttggtgagaacacttacaatctaccaaattagcaaatttaaagtaaataatgcaatattgttaaccatagtcacattgcggtacattagctatctagaacttattcatcttgtatcactgtactcttttataccctttgataaacatctccccatttcccttttccctccccagtcctgacacccaccattttactctctggttctatgagtttgaatattttagattctacatgcaaataagatcatgcagtatttgcctttctgtttctggcttatatcagttaacataatgtcctccagctttatccatgttgttgcaaatgatgggatttcctttattttttaaaacttggcaatatttgtgtgtgtgtatgtgtgtgtatgtatgtatgtatgtgtgtgcatgcaccacattttctttatccattcatttgtcatcagaaatttaggttgtttccatgtgttggctattgtgaataatgttgcaaaagacatgggagaacagatatctattcaagattctgatttcattttgttttgagatatgcccagaattggtattgctggattatatggtagttctatttttaattttttaaggaatccccatacattttctacaatggctgtttagtttacattcctttcaacagtgtacaagagtttcttttgtccacatccttgccaacatttgttatcgtttatctttttgataaattacaggcacgtgccaacacacctggctaattttttatatttttggtagagacggggtttcaccatgttggccaggctggtttagaactcctgacctcaagtgatccactgcctcggcctctcaaagtgccgggattacaggtgtgagccaccatgcctggcctattttttctatttctataaagaatgacatttgtgtattgataggtctagcattgaatctggagatcactttaggtagtatgaacatttaagaatattagttcttccaatttataaacacgagatgtcttgatatttatctgtatcttctttaacattcttcatcactgttttataatttccagtgtaaaactctttcacctccttcgttaagtttattcctaagtactaattccttttgtaaatgtgattgctttcttaattttattttcatatatttactgtctgtgtgtagaaacgtcatcaatttttgtatgttgatttttttatccttcaaatttacttaatttagttttaacagactttttgttattgtggagtctttaggtttttctacacttatgtttatgtcatctgcacacaaagattaggattttaatccttcttttccaatttggatgcgtttcatttctttttcttgtcgaatttctctggttagggattccagtgcaatgttgaattaaaataagtggagagggggcatcttgccttgtgtgggatcttaggggaaaagcttctgtttttttcccattgattatgatgttagttgtgggcttttcacatatggtttttattgtgttgtggtaagtttcttctgtacctatttcattttatttttgtttttttaaatatttattttataatagagattaattttgctatgttgcccaggctggtcttgaactcttgggctcaagcgatcctcctgccttagcctctcaaaatactgggactacaggcatgagccactgtgcccggcctatcactattttgttgagagttcttttcttttcttttccttttttttccattgctttcttttcttttcctttccttttttcctttccttccttttcttttcctttcttttctcctcctcctcctcttcctcttcttttttctttcctcctcctcctccttcttcatcttcatttaaaatcatgaatggatgttgaatttggccacatgccttttgtacatctgtggacataatcatatgtgtgtgtgtgtgtgtgtgtgaatctttcagcctgtggatgcgctataccatccttgcacatgcggaatcatccttttatccagggataaaccccacctgttcctgatgtatgatcttcttaacatactgttgaatttggtttgctagtattttactgagaatttttgcatttaatatctgttaatgtttatcagaggtagactggcttgcagttttttttcttttctggtgttgtctttgctttgttttggtatcagggtgatcccgacctcataaaacaattttggaagtgttcccttttctattttttggaagactttaagaagaattaatattaactcatctttgaatgtttggtagaacattcagctatgaagccatctggtcctgggcttttctttgttgagatatttttgattattgagtcaatctccttctttgttattggtatgttcaggctttgtattttttattgatttgcttttttttttaagttgactgtttctaggaatttatttatgtcttttaatttatctagcttggtgtataatttttcaaaatagtcccttatgatcctatttatttatttgagacagggtctttctctgtcacccaggctagagtggagaggcttgaccacagctcactgcagccacaacctcccaggctcaagtaatcctcccacctcagctttctgagtagctgggactacaggcatgcaccaccatgcctggataatttctttttctttctttctttcctttctttcctttctttcctttctttcctttctttcctttctttcctttctttcctttctttcctttctttcctttcctttctttctttctttctttctttctttctttctttctttctttctttctttctttctttctttctttctttctttctttctttctttctttctttctttctttctttcttttcttcttttttttgtatagatgtgacctcactgtgttgcccaggctggtcttgaattcctgggctccagagatccacctgcctcggtctcccaagtgttgggattacaggtgtgagcctttttatttctgagaaatctgttgtaatagctccttttttcattttggattttatttgagtcttctctcttttttcacagtgtagctaaggatttgtcaacttcgtttaatttttcagaaaaccatctcttagttttgtttttttctattatctgtttgatttatttctgctgtaatctttattatttcatttttttctgctaagtttgggcttagtttgttcctctttttctagttcgttgagttataattttaggttgcttatttgagatctttcttcttttttaatgtttgcttatctccataaacttcccacttagcactgcttttactgcatcctataggtttggtgtgctgtgttttaattttcatttgaagatatttttaaaattccctttggttttcctctttgacccaatgcttgttcaacatgtgatgtttgatttctgcctatttgtgaatttttccatttttttttactgttattaatttccagattcatttcttgttgtaaaaaaagatttttggaatgatttaattctccttacatttcttaagacttgttttgtgaccaaacatgagctctctcctggagaatataccctgtgcatgtaagaagacattttgagaacccaggtggtcttttctcataccatttttctcacccagtgctcatactgaggttagttcattttacatctaacattttctcagcctggagctaagacacctcatgtacctttgacaaagccattctagcacaagcaaaacggtcctgagaacgagtatcttagccacctggtatggcagaggacacattcatcatggaaaaagtctgaggaaaagggtcaagattagcatggatcgagggtctggtcctgagctgggaggagaaaaaggcaggttggagtgggaccaaaccaggtatttctatctctcacttagaattgtgtcttggtacttgagatgaaccatctgaggccaccagggggcagcaggggactaggttggagaagatgattgataaagtttatcctgacctttaagaagcccctgagtcggccgggcgcggtggctcacacctgtaatcccagcactttgggagactgaggagggtggatcataaggtcagaagatcgagaccatcctggccaacgtggtgaaaccccgtctctactaaaaatacaaaaattagctgggcgtggtggcttatgcctgtaatctcagctagtcgcgaacctgaggcaggagaactgcttgaaccagggagttggaggttgcagtgagccgagatggcgccaccgtgttccagcctggtgacagcgcgagactccatctcaaaaaaaaaaaagtccctgaatctcaaaaaaaagaatgtgactttatgattaactatgaacagctgctcattaataaaaagccattaaaaaaaaaaaagaaatcccaagagctacttacccttgaatatctctaaaggtactgggaagcagtgctccaaatctgttgtggcccagtgaattcctttttagaagcaccattaatggtcctagttcaacatgtcaggccccagctttaaaccactgcaggggcaggggatgtagcagtgcttagaacccaccttagctgagaggaccaagatggttgggcaggggatgagggaaatgagaagttccagcactgtctgaagtctctgggaggaggagtgattgaactttcccacccggcctgggagcagcctgtcctcacattcatccctcacagcacaaaggagaagtcctggtttcctcagcctggagctcctgcaatagtgagggttaggatatctctggactggcctgatgtcctgggcactctcatgggttcagtctcaggaaatccatgcctaggctggattaataccctcagctgagcctcacagggaagcagaagtctctgagcccaggcccaggtgagggtggggtgaggagaggagctcaggacacagatttgcatggaggccctgccctcctctgaggcggggggataagacagggctagaggcaggcccggtgctggggtctcaaggcagcgctctcgggacatctccaccatggcctgggctctgctcctcctcaccctcctcactcagggcacaggtgacacctccagggaaatggccttggggacctctgagctaatgcttggtcttctgctcctgctcctcagggtcactggacccagtactgacccagtagagtgtgtttctccctctttccagggtcctgggcccaatctgccctgactcagcctccttttgtgtccggggctcctggacagtcggtcaccatctcctgcactggaaccagcagtgacgttggggattatgatcatgtcttctggtaccaaaagcgtctcagcactacctccagactcctgatttacaatgtcaatactcggccttcagggatctctgacctcttctcaggctccaagtctggcaacatggcttccctgaccatctctgggctcaagtccgaggttgaggctaattatcactgcagcttatattcaagtagttacactttccatagtggtccaagttcctagggaactgagaccaaaacctgccctgggctctcaggctctgtctttgctctgaagatgcttcctcaccctgtgccaggggcttcctgcaacagggccttgagaattcacttctctgtcagctcctctccttttccatcaattcccaaaggaaacctcctctcttgtttactctccgggatatgacagcttcttcttcactcgtatgacggatgtcctctctgaattggaaactacttctagctctttaacaggaagtacataccggcagggaaatgcctgcctagtgcagtccccatacttctccggatgatcctcactttattatttatttttatttttgtatgcactaaagtcgtcaatgtaaatccttacgtcgaatgcctccacttcccacattgtgtagcacagcctggattcagttcttcagaaatgacgtcctcttcaatgataaaggaccactgctctgtgaacaccccactctagtgaagatagcccaccttgctgggttattcatgtacatcttttgtggaagcagtaaccactgtgtaaagctccaaagatgttttaaagcaatgaaaacaaagaggaagaagtgtgtgtgtgtgtgtgtgtgtgtgtgtgtgtgtgtgtgtgtgtagggtccatcctgtttgccctaatatctcaggttgccgagctagggagtatttgagtgacagacttggtgccctctcaggatcctcctcctctcacatcactgagtccctgtcctggaaacaccctacaggtggacaatctccccatagtatggaagtttccaaaatggctccacagggaagagttgagctgaacacacccactctttctcatgggcatcaaatatatctaatttttctggggaaatcatcaatttctagctggaatcctgattaatcgacagactgtgagaattaaaaattttaaaaatattcagacatatccagagtccagtatttaaattctctggaattttgtgagccaatctttaaacatagttattattgtagtttagagttcatgaacctgaattaaatagattctagtaaacataaagtgccttagttgtctattgttgcataaaaattactcctaaaattaacatattcttaatgagaacacatatgcattaatctgttttcgcactgctataaagaaataccttatttataaaagaaagaggtttaactggctcacagttccacatggctggggaggcctcaggaaacttacaatcatggtagaaggcaaaggagaagcaagaactttgttcacaaggtggcaggtgagaagagctggggagggtgaacttccaaatacttttttttttgagatggagtctcactctgttgcccaggctagagtgcagtggcgtgctctcggctcactgcagcttctgcctcccaggttcaagtgatcctcctacctcagtctccgagtagctgttattacaggcatgcgtcaccaagaccgactaatttttatatttttagtagagatggggttttaccatgttgaccaggctggtctcgaactcctgacctcaagtgatttgcacacctaggcctcccaaggtgctgggattacaggcgcaagccattgtgcctggccccagacacttttaaaaccatcagctctcatggtaactccctacccatcacgagaacagcaaggggaaaactgcccccatgatccaatcccttccgtccctcaacatatggggattacaagtccctccttcaacacatggggattacaatttgagaagagatttgggtggagacacagagccaaaccatattaatgtatttgtgatcttgtagttttcttgcatcaagaatctgagagctgcttagtttggtggttctgactctgggctcctcatgaaattgcagccaagctgtcaggcggggctgcattcagaggccagagcaggtggccaggcccagcctgagggggcttctactgtccctaacctctttggcagatgtagatgaagtcagggaaaaggggagctccccacagtgggtagcatcccagtgtcagagggaaggcaccatggagcagtgggaccagcacaggaccctgggggtgcactcagacctacctggagggatggcaagaaggggcattcacagcagggacaggataaagggcctctgccccatgtccagagctgtcttggcagctcagtcacattggttatcaggtaaatcggaggtaaaccctatcctgagttttaccactgaaaatgggtacaatttgaactaggagtgttttcagactttttctttccatattgacttcttaataaccgcgatttaattttttttaaccccagcctagtttagctacatagcttccaaatgtcatgctactgtgaaactgagcaattagttacttttatcagagcattttaaatttgaacaggttccttggtctttctatgtgtaattagtcaaagcttaggtatggagtagaggatctttaccaaatgcttttctagactctgttttcattggacttatagcagctgtttcacctgggccatgcaggaataggagagttgttgctccttgacatagcatctgtaacatgcctatcctttctgccactataaaaatagctgtgctttctctccactcgtctctcctgctgtttccctgtttttcctattaaatatgcagtgtttgcaatccatcttgcattctgagaagatgaggattttttttcataaagaatgacctaaaatagctctaaagatcatcagaagtcacaactacatacttactggagtgcaataccaaatgtggcctctgattacagtaacctggagcttgcagtttaagcaattcagtccctgtcacttgtggacagattcgtatgtctgtggatgagaagatgagcaacggtcactcctgtgctcatgcacagatccctccctgcccctgtcctcaaattcagactgaagtgcatggccctggagcattacatgagtgatggtttaagagcacgttggtgatacacacaatattaatggtatcttaatttgcttgttaagcataatttgaaaacatctggacaaatttggacacaatttgaagggcatatttgataatagcttgtgacaaatgattccgttctgggagagatgctatttttggttctctaaatcgccatgaaatgaaaatctcagattataaagaaatagactcaaatcccaagtgtcttttgcttttcattccccatcaactgtgttgcccaagcaccatgtggacactgcttacagggtaggcagccaccagctgaaggcaggttctttagttgtctgagctgtcctggagctgggaacagcagcgtgtgttctgtgcctgttggtccctatgtagcacacacccactgcatattctcgctgactcaccaggagggcttgcagcagccctggcctattttcttctgaagcacctgccaatggtgcattctcccctggtcataatgcaccaggagataaacatggcatttgacacacaggtgctaactggatctaggacttctaagcttaagtagactcagagtgggcaatctaaaaaaaaaaaaaaaaataggttctcaatcggtagcccaggctggagtgcagtggctccatctcctacctcagcctcctgagttgctgggacaacaggtgtgtgccaccatgcccagccaacagagagggcaatatggacttgaaatggacaatttccattacttgaaagtttttgagaaagaactgaggtttgtttaagaggaaatcagccagagactcaaagttaaatctatcaggcccaaagtctctttggggaaaggagactcttggacgtgcacgcagcagcaagtggtatgggatcccttctctgtggggaccttggcccaactgccaatcttttcaactgacccatttgcgttttccataagtgctcgccagccagcagctgtgactgcccctcagtctcaggaagggagaaagaaggaaacaggagcaaagcctctttcaatcttagcaaataaagtgggagctttgacttttttgaacacccagatgacaggaaagaggaggaaaattttcctaaagctgttattttttaatgcctcaggaagaatcacacccggagtctcatccacactttatttggaggtatttgggtctcagagtttgtgctgagttagttaatgatttgggctactgggatggggtgaatgtgttttacaagtgagaaagaaataagctttggagtccacagggtggaggcttattggctaaattgtgtccctcaagattcatgcaatgaagccttaatcacagtgtgtgactaaatttggagacagggtctttatggaggtgattaagtgaaaatgaggtcatgagggtgggttcttatccagtctgactggtgttctccttagaagagaaaatttgcacacacagaaatcagacaccagagatgagcaggcggaggaaagaccatgtgaggtcacagcaaggaggtaacgacctgcaagccaaggagagaggcctcagggaaaatcagtcctaccaacactttcaccctggactttccagcttcagcactgagaaaataagttttgctgttgaggccactagttctttggtatcttgtgatggcagcactggcaaatgaaaacaagagggaccccaaagaccttgggtagggggaacagatggagcagggtgcaggaggcagggcagggaggggctggaaggtcatgctctgaggttcgtttcctggatggaactgggactccactcactactgtctggggaacttggggaaaaaacttcacctcccaatattgattccctaataaaatctgggccctgagcatagggctcctcatcttcctactccatatgatgcaagttttcttgaagttatgcttgtaaaacactcaccaatgcatctggcatatattaagggctcaaaagtaggccaggcatggtggcttatgcctgtaatcccaatactttgggaggccgaggtgggggatcactggagtccaggagttccagaccagccaggccaacatggtgaaactccatctctactaaaaatacaaaaaaaaaaaaaaatagctaggcatggtggtgcccttctgtaatctcagctattcaggaggctgaggcaggggaatagcttgagcctgagaggcggaggttgcggtgagcccagatggtgccattgcactccagcctagatgatagagtgagactccatcacaaaaaggaaaaaaaaaaggttgtcattctgcagcccagatcgtgccattgcactccagcctggacgatagagtgagactccaccacacacacacacaaacgcacacacacacaaaaactaacccccgccccgcaaaaatcgaaggtagccattctgctgtatgatctattgatacatacaggatgacatttgtcctgtgggcaccagggggcactgtgacccctggtttgggacactaatggctccaagtccctggtagtacttgagtcatttcctttctggccccttctattgagtggaatcctgaaacccacctgactcttctactcttgaaaaattacgcagagaatgtcctcagacatagggtcagacaagaacttcgacatacattttaaagaatggagagcagatttacatccgctgcttaacagggaaccaactaacaaagaattaagaataaaggaagtagagttgcatgaagagactcccctttctatgataagaaaggcctgaaggtcccttcccagctgtggactcagaggcagagctctggggcatttccattatggcctggacccctcccctgctcgtcctcactctctgcacaggtgctgcctcccagggctcagcccccagtgggatcaagatcagcctggccctgaccttcaactcaacatagggagtgatgcagggtgtggggttctgggaatgaggccctcatcctcagactcacctctcctgtcctctcttgtgggctccgttatttcctctgggccaactcaggtgcctgcagtgtctgtggccttgggacaaatggccaggatcacctgccagggagacagcatggaaggctcttatgaacactggtaccagcagaagccaggccaggcccccgtgctggtcatctatgatagcagtgaccggccctcaaggatccctgagcgattctctggctccaaatcaggcaacacaaccaccctgaccatcactggggcccaggctgaggatgaggctgattattactatcagttgatagacaaccatgctactcaactcacagtgacacaggcagatggaaaagtgagacacaaaccctttttctgtctgtgtcactcacttcctccggccccagcaggactgtggacacagccatgggcaggtctggctcagttttcctggatctgagaccccagggtgccctgacctccaagccctccagggagactctgaagagagtgggttaggtcaggagaggacttggggctggcaggaccagactgtcctggtattgtccagagtggctgtgtcttggcttaagatgacctgagtgtaaggatagtcagagggagacagccattgagtggtaatggtccctggatttccttctgtatggtgactggacctaaggcagtgctgcttttctgtggcccaaatgccccagatcattctgaacttctcaggtttaactgagaccctcaagccccagctccatgacatcctcatattctgaacagggagggccaccacaatgggcagtgtggtgtccatcaagattcccctttcagggctcacccatccgccatacacccaaagctgccgggaggccctggcttctcacagctgctccccaccggaaaatgccattgattgcaaagaatggcctcccccaaaagtttgcccatgtcagagcgtggctcaggtgcaatgactgcttgatgcctcaatcccaaagtcaggccttaatttaggatggccttgaagtgtgttgcagctgagcactcaattgtaacacattcccactcatgcctcccatacttctttcctgagaatatatccctaaacctcactgcatggaattccccctctcagagtaggagtctggggaattaaaagatttaaaaacaaaccaaaacagtccaaagggaagagtaacaaagaggagagagttgcacagagagaggactctggagtctgcaaatgttcgtgagcaccgatgagcacatatgtgggaggaaacaacctctggaagagaaaagaaccatccaaagacacttgagagaacactccagagcgtgtgtgcacgcacacacacacacactcacaccccacataaagaaaacaacaacactcatcatcatcaaattgctaaaaaacattttagcaattttatgctaaaatgatgatgaagaaatgtggtgaagaaatgtagccttaaaagtagccagagagacgaggtggctcacgcctgtaatccaagcactttgggaggtcgaggcaggtggatcacctgaggtcaggagtttgagaccaggctggccaacatgatgaaaccccgtctgtactaaaaatacaaaaaagttagccggatgtggtggcaagcgtctataatcccagctactcgggaggctgaggcagggagaattgcttgaacctgagaggttgcagtgagctgagatcgcaccactgcattccagcctgggcaacagagcaagactcaatctcaaaaaaaaaaaaaaaaaaaaagtcagaggcaaaagacatgttagatacaggtgaacacaatgacaagagcagaatttttattagaagcaatgcaagcaggaagtagtggagctatatttataaaatatgaaaagaaaaaacttataacccagagcaatctacagcctcactgaaatccctaccaaaataccaatgacatacctcacagaaatagaagaaaaaccccacaattctacaatttgtatggagccacaaaagacccagtatagccaaaatgacactgagcaaaaaacaaaactggaggcatcacattacctaattcaaaatatgctacaaacggccgggcgcggtggctcacgcctgtaatcccagcactttgggaggctgaggcgggcggatcacgaggtcaggagatcgagaccatcttggctaacacggtgaaaccccatctctactaaaaatacaaaaaattagttgggcgtggtggcgggctcctgtggtcccagttactctggaggctgaggcagaagaacggcgtgaacccgggaggcggagctggcagcgagccaagatcgcgccactgcactccagcctgggtgagagagcaagactccgtctcgaagaaaaaataaataaataaaataataggccatatgtgatggctcacacctgtaatcccagcagttaggaggccaaggtgggaggattgcttgagcacaggagtttgagaccaccttgggcaatataatgaaaccctcatctccacaaatttttttttttaaattagccagccttggtggagtgagcctgtggtcccagttacttgggaggctgaagtgggaggatcacttgagcccaggaggtggaggttgcagtgagtcatgatcttaccactgcactctagcctgggcaacagagaaagacactgcttcaaaagcaagcaaacaaccaaaaaatcaagtaatatcattgaaaagggggcaaaggatcagaatagacttttctcaaaagaagataaacaggtggccaacaagcatatgaaaaaatgctcaacgtcactaatcatcaggtgaatgcaaatcaaagccacaacgagacatcatcttaccccagctggaaaggctatcattaaaaagacaaaaaaataacaagtgctggtgaagatgcagacaaaacagaagacaaaaaccacgtgatcatctcaacagtcacatcaaatgttttcatgtagggaaacattactgtttgtgattttccagacttgctagagcatcataaaaagtaagatttgtggtgccgatattggagggggtgttattctgtgcaaaaaacctggatatcccatatccaactgtgaagatacttactgataaatgctaaaaaattgcaatattgtgtgtccaaatgttctgggggtcaggagtggggtctcacacgggaaaggattcagtcaaagagaaaaatagagaggctagaacatagaggaaaacataatatgtctggaaataaggagtccaaactaattggagctgagtgataacaaaagaacaatggcatgaaccatctatttctctctggaaatctcattgatatattgtgctctctccagggctatgcccagctagattataaaattgtctgttcctgaaacgtttcttgcgtatatgacagggcctaacactggaatcaagctcaggttgatgagggcagggcagttaagcacccgaccctggtggcctgtgaaatacttgggggagacaggggtttgttgtctaaagcagaggaagtgagattttccactgtggcttagaccagagcttctgaaattccagtgagcaaacaaatcccctgtggagtctgtttaagatgcagatgcagcctcagcaggtctgcgtggggccccagagtctctatgtccagcagctcccaggtgaggctcatgctgcttgtcctccaagaaccacactttgagtggcttaactcctattcgccctcctcactcaagcacaggtgagactctgccaaggaaggcactgtctgagaagcaaaggtgaccttctgtccttcctcccctggtgttttagtccatgttctattgccataaaggaatatctgaggcagagaaatttataaattttaagaaagatttctttggctgaagcttctgatggccggaagttcaagagtgggcatctgcatctgttgagggcctcaggttgcttccactcatggcagaagatgaaggggagccagtgcgtacagagaccaatgggagagaggaagcaagtcttttcctaacaagaatgcagggatgtaatttaatcatatttataaagtgtttgacatagagcctgacacacccaggtactcctagttggcagcaattattactgtcgtcgcacatgaaaattggacctgggatggaggaaaggcagcgcaaaccctctgtttgggacaagagagacttaaataatttaaaattgaggcataggagataaggagagtatccctgggtgttctcctgccaattctctcagcatctcggaaactgtttcaaggtgatgaagtcaaccagagagggaagcggaggagtttgtagaaccaagggttgcaacttcatccatgaggaggaggtgtagtcaggggattgggaagaggtggctgagctcatctgaagggtgtctaaggttttctggcccccatgtcctggcccatccctccctgcccagggtctcacccctcacctgacagcccagagctggagagtggcctatgattctgattagagaccccaccaaagcccagaggggaagacatgggtgggaggcgtcacagaagacagttttctgcctgtggtgttggggcagtttcctggaaaggaaattcagacactgtaggggagaagaaaacacaggagaggaaggcccctccccaggggattgtggcgttagagaccaaagcatcttcaagaagcccagccctgcaggaggttccctgagcccagagttcctagagctgtctgtattattttgcctggggtgccataaaaagtaacacagactacatgactcaaagaacagaaatttattgtctcactaatcttatggcgatggtagaatctgagatcaaggtgttggcagggttggctccttctgaggctgagggagggtctgtttcatgcctctcccctggcttttggtggtgtagcagtattagctgttccctggcttataggtgaatcaccccaatctctgcctccatgttcatatgacgttttctctctgttcatgtcggtgtccaagttttttctttttataaaaagaccagtcctattggatttggggctcactctattccagtatgacccgatgttaactaatcacatctgcaaccacccttttcctatgtaagttcccattctgaggtcctgatggatagcacttcaccatatgaattccagggggcacaaaattcaaattcccaacaatgggccaggcacggtggctctttgggaggatcccaaatcccagcactttgggaggccaaggtgggcggatcacatgaggtcaagagttcaagatcagcctggccaactggtgaaaccctgtctctagtaaaaatacaaaaattagctgggcgtggtggtgcgtgcctgtagtcccagctactcgggaggctgaggcaggagaatcgcttgaacctgggaggtagaggttgcagtgagccaagatcgttccactgcactctagcctgagcgatagagtgagacttcatctcaaaacaaaaaacgaattcccaacaatgcctcagacatggcttaagctgcccactggggctctgcaggtgggatgtgcaccaccaagctctcaggtggggcattacctgacagcccagaaggactccgggccctctgcaaagtgcctgatctcttgcgcaccttaaaaggtagcttttcaggctgttcttgttcttttcatgctgacgtaggagattttatcctctgctttttaagtagaagcttccttaccctcctcatcatcctgagtagatgcctaggctggtttcagagaaatcaaaccagggtggattatgagttatattagccaccagctgtcaatattctctgaatgcccagcatccatccatgctctctgaccatcaccagagtgagcaaatctctgacatgtggataagagtttcttccatgggctcccagccaggctgtaagtgagaccagaatacccttccttcagtgcatggggctcagtgcagctgcctccctgacagtctccctgggacattaagcttgtcagcttctctcttccaaatgcaggtctggttgtcctaagcccagctcagcgctgctgtggactttgcatcctaaaaacattatcaactctgccttgtgcctcagtggactggcctggaggaaacaatatgaggtgtcctggctctttccacccccagcgtctctctccctcagtggtaccagtacggtcctcatgacggttcatctatacctgccaatctaggcctccacactgccgactgtggatggtcacagaacccaaaatgctaatcagccttaagcagatcatgctaatagtttctgcagatctgggtgcctcatcccagatctaggagttcacaagctaggccagctccagggagataacatgtatcacagagtctggacacgacaaagtggctttgctgtatttttgctgggacacatgatggtgatatcaataagaactggctcaggtccctgcagcttaaggcccattgaacaggaaagcagccaggaggatgtgctgccttttgacctgtacacaaatcagtgccatgtgccgactgtgtgtgaatatctgtgcctgtgtgtatatttgtgtacatgtgtgtatgtatgtgtacgtgtccaagttggtgttgcaaggaagtgttcctactgtcaaatgtttcaaactcaaatcttttctgttttcctaacttacctgcttcttctatctctagtgcctttgttctgcactaagaataaggatgaagattagggtagtaatactagcaggaggagtaaagattcatatgtgtttaatacatatcaagcagtcttccaagtacttcatatttattaattcccttcatctcaacaactctatgagttgttcattatccctccgttttacagttgggaaatctatgatacatagattttgagaaatgggaaaactaatgcagagaaaagaagaataacatgcctgatgtcagaactagaaagtggctgacccaggagtagaatctcaggtcttctggccccagaaaacctgttcttaggcaccatcctgtcgcctgtcattgcatcaatgtggtaaggcattggtgtgtctttaaggctccagaaagttctttctactttgtatttattttgttttgtttttgagacagagtcttactctgtcacccaggctggagtgcagtggcaccatcacaggtcactaaagtctcaaccttctgggctgaagagatcctctcatctcagcctcctgagtagctgggactacaggtgaatactaccatgcccagataattttaaagtttttttgtacagatggggtctcactatgttgcgtaggctgttctcaaactcctgggctcaaccaatcttcctgcctgagcctcccaaagttctgcaattataggcatgagccactgtgcccaacctttactttttaaaagtatcatattgtgactttgagtgcaccagcagtgctctagtgctggtctattagaaatgtaattttaagaatatatatatataatatacaattttttagtggccacatttaaaaggtaaaagaaacaggtggaatttatgttcataatatattgtgtttaaatgatttatccaaaatattatttcagcatgcattcagtattaaaatattgagatatttattttatttttgtactaattctttgaaatctggtgtgttttactcctacagcacatcttacctcagactacccatgtttccagggctcagtagctccctgggactcatggccgccatattggacacagcaagtccagatggataaaggtccatttgggtcacagcccctgcagtacatactgacagctacctgggaagaatggagagttccatgacccaaagggcctcctgagggaggaatggcagctctactttccagccaaagcaggaatattgagggcactaagaaacaagggaatttttacagtgtgtttcacacttcttcccttctcaaagacattaaatataacttcaattttaaaggtgaacctcggccatcaaaggcatgttttctattggtctctttccggtggaatgaatggcaatggtccctgtaaattgtgctccaaggatccctttcagtgggaagattcttgtgataagcccaataacaagtaagaaagcaattttttatacatagatctagaacaaaaagggctcatgatgaagaatattttattgaagcttagtgtattgctatttttcataaattgctgtttttgcctatcccacaagcactgatcacttttatgaaggtacattctccaagggtcgtcttagcatgtcaggacccacaagcaaaggtgttacaagtgacctgcacgagtggccagcaggacacctggaggagcccagtgagatgaggagtggatgcgcatcaggtgggaaggcatggagaagctgtgtgccacacactcaccaaggacaggagcgggcgtatttgtggcctgtggcctaatcttaggtcagttacctctttagactaaatcccaaggagtcagcacatggaggtttcggtccgtgcacatggcacctacagggcttcacatgacgttgctaattacaatgcagcggcacttacaaaggaattagtttcatcacatcctcagcagaactaggtctaaaaaccaatatatatgtataggatatcaggtgagaaatactttcttgccaatcatgtgtattaacgttaaagtggttcagtatctagtgtgacagttgttcaggcttagtggccttgaccacgtcaaaaatggaatcctgatcctaacttgtctagagattagcctggcacaaggagcatgaccaggcatctggatgtccccagtgtcactgcagacacatgctcctttttcatctgccagagggagcattaggatgtcctcacctctgtccccagaactcaggaagggcagtacacctgactaaagagtagagggttgtgaaaagagggacctagggcactggataagcaggaggagaaggagcactgggtgggaggtagagaaaggagggggctgaatggttaggctctgaggtgtgtctcctggatggagtcttggattccactcactaccatctgagaactttgagaaaaccgtgtaacctcctgatgttgggtctcttgtcagtagacatcagtgctttcctgatgtatagggttactgtagaattataatgaatgcctggttgaggtgacatgtctaatacaccctccaaagcatcaggcatatattaagtactcataagcaggcattctgtgtgaactagtcatacatggaagatgacattccccgtgtgggcacagtaggatgctgtggactttggtttggggaccctaataacttcaagtcccctggtagcacccaagtgtaaaaggcaaagggcatgactggtgcttcctgtgaggcctcttctatttggtaaaattcactctccactcatcgcacccacctggcctttattctaaacttggaaaattgctaacatgaaggtctcagcctcagggctcagataagaactcagacacatcaatagagaggatggctgaggtgcttggccgagctcagtgaacaccccagaacaggaactgaggagtgtatgcatgtgttgggggcagcactttctcactcatccagaaagtgtgaggaatctgtacagaactggggacagggcccatttttatacccttctataagcccagcccttgtctgctcactagggagccattcaccaaggccacaggagggaaggaagtagatttgcatgaagagcatccccttcctatgttaagagaggcctggaggccccttcccagctgtggactcagaggcagagctctggggcatctccaccatggcctggacccctcccctgctcaccctcctcactctctgcacaggtgctgcctcctagggctcagcccccacaggaccaagaatcagcctggccctgacattcagctcagcacagggagtaatgcagggtgtggggctctggaaatgagacccttatcttcagactcacctcttctctcttctcttgcaggctccgtggtttcctctgagctgagtcaggagcctgcagtgtctgtggccttgggatagacagccaggatcacctgccagggagacagcatagaagactccgttgtaaactggtacaagcagaagccaagccaggcccctgggctggtcatctaacttaacagtgtccagtcttcagggattcctaagaaattctctggctccagctcagggaacatggccaccctgaccatcactgggattcaggttgaagacaaggctgactattactgtcagtcatgggacagcagtcgtactcattccgcggtgacacaggcagaaggggaagtgagacaaaaaccttttctccatctgtcacactctttcttcagctccaggaaaaaactgtggacaaattcatgagcaggtcttgccctgttcacccagatatgagaccttgaggctgcccttccctccaggtctccaggtaggctatgaaaagggtgaatcaggagtcaatacacacacaattattataattttattcttgtttgaagaagaagtagaggaataattgaacatgtaaagtgaaaacatggaaaaccgaaaaagaggaattattgaacttgtaaagatgaaaactacaatgtctgaaatttagaaaatacactgggtgagtttgacaacagaaaaaagattagctgcaaaaaaaaagattagctgcaaaaaaaaagattagcaaattgtataatacagcagtagaaattgtccaagatgaaacacatatgggaaaaataattatggaaattaatgatagaaaggaacagagtatcagtgagttgtaggacaacttcaaacagcctaaagtatgtgtaattagtgtttgaaatagaaatgggtggaggagaaatagaaaaaagtatttgcataaataatggccaaatatttttcacctttggtgaaaaccataaactgaaatatccaagaagctcaacaaaattcaagtataggagacatgaaggaaacaactccaacataaatcataatcaaattaataaaatccagtgatgaagagtcacctaaataataatgctaagagcagttctcattaaaagcaatgcaagaaagaagacggcggagcaatgtcttgaaaacactaaaagaagaatcctgtcaaccttgaattctttttcttttcttttcattttctttctttctttttcttttcttttcttttctttttttctttattttttttttttgagacagggtcttactctgtcacccaggctggagtgcagtggcacaatctcagttcacaacatccagggcttacatgatcctcccacttcagcctcccaagtagctgggaccacaggcgtgcaacactatgcccaggtaattttgtattttttgtagagatgaggttttaccgtgttgcccgggctgatctcaaacttgtgcacttaagcaatctgcccgcatcagcttcccaaagtgctgggactccaggtgtgaaccactgggcctgccaaccttgaatttttttaataaaaacaaacaaacaaaaactttcaaaaaaggagacaaaataaaccctttccagacatatgccaaattaaagaattggttgctatcagactcttacaattagaaatggtcaaggacatccctagacagaaggaaaatgataccacaatgaaatgtgaatttataccgaaaaatgaaaacatcagatatagtaaccacaaggataaacatagaaacctctgaattgtgttaatgtctaataaagataattaacacttcaaagaaaagctaacgtaaatacattgtgatttgtaatgaaaatgaaagtaaattatgtgacaaagcacaaaagctgaagggatgaacaacatgttataatggtcttatactatatgtgaatatataataacacttgaaggtaaaccttgataagttatatacgtactgtaaacccaagcaatcattaagatcaacttttttttttttttttttttttggagtctggctcagtcgcccaggctggagtgcagtggcacgatcttggctcactgcaagctccgcctcttgggttcacgccattctcctgcctcagcctcccaagtagctgggactacaggcacccaccactacgcccggctaacttttttgtatttttagtagagacagggtttcactgtgttagccaggatggtctcgatcttctgacctcgtgatctgcccgcctcggcctcccaaagataaacccttttaacagaaataattatggctagtaagccatattagagttctccacagaaacaaaatcaataggatatgtatgtgtgtatatatgtataatgtatatatgtgtatatgcatgtgtacatataatgtatatgtgtgtatatacatatctaggtacatatatatggagaagaaattggttcatacaattgtggctgactaggatgaaatctactgggcaggctgaaggctggacatttaggtaagagttgatctcgcagttttgagtctgaattctgcaaggtgggacttcaggaatcctcagtatttgctctgaaaaccttcagctcattaatgatgcccacatgcattgtggagagcagtgtgcttatataaagtctacagatataaatgttaatcacatctgaaaattatcttcgtgccaacttctatactcgtatttgacaaaatcaactaggcactatacctagtcaatctaacacttaaaattaaacatcacttaaaccagcaaggagataaaaagaaataatttttaaaaatcagtcaaaaaaaggaaacagaaaaagggaaggagaagcaatgaacatatggcacaaatagaaaatgaagggcaagttggcatatttcaaccaaattatgttactaatcacattaattgtaaatagtctaaatatcacaattaaaaggcagagattgtcatgttgaaatgaacaagactcaactatacatgctgcctagaaaaaaaaccacttcaaattataaaaccacaaaaatccaagtacaaattaaggacaattccccccactcccaagtctgtttcacaaagcagtacaaagaaggattcacagtaaattttttttttttgaagtcttactgtgtcacccaggctagagtacagtggcaccatcttggctcactgcaacctccaccttccaggttcaagtgattctcctgcctcagcctctggagtagctgggattgcctgccaccatgtctgatgaatttttgtagttttagtagagacagggtttcaccgtgttggccaggctggtctcgaccttctgacctcaagtgatccgctggccttagcctctcaaagtgctgggattacaggtgtgagccaccatgcccagcccacagtgaactcttaacacacagttatagaaatatgcatcacctctcccatcaccctttcctctctctggcttccaaaaccttggttctggtaccagagctgagggaaaacattccacagaaatattaaatcaaggtgaagaagggagattctcaagatgtaagtaaaaggcaaatgagggaatggaagtcgcaatgcccttgcatgcataaggacagctcctgcatgagaatgttgtttgaaacattaccgaggaattggtgtccatgttcatgcaggacataggtctataggatatttttgtcatgcctttgtcgggctctggtatcagagtaattcaggcctcaaataggtagtagggaaatgtttgcttctcctctatattctgaaggagattgtgtatgattggtgtcatttcttccataaaaacttgatagaatttaccagtgaagtcatttgtactaggtgggcttttcttagcaggaagattttaaattgctaattcaatatatttatgtgtcatagatctattcagattttctcctttatgaatcgattttgataatttatgtatttccagatacttatccacttcatttaagtcatccataattttggcatttattgttcgcattattccctataaccattgtaccttttgtaaggtcagtggtgatgtcactctttaagtcatggttttgacaatttgggtcaggagaagatttggaggaggagagaacaaggttgtcttgatgttgtcttggctggagtgtgacttggagaaaaatgacttgaatgaaaatacagtcagagggagatatctgtcaagtggttctggtgcctggatttccacatgtgtggtgacggagcccagcccagtgctctactcatgcccagatgtcctggattattcccctgaaatactcaggtgaagctccagctacaccatggcatcctgatattttaaacagagaagaccagtgtcatgggcactggtgatctgctcctcagggcagactcactaaccgtggcagctgggaatcccaggggcctcacagctctcactaaccgtggcagctgggaatcccagggtcctcacagctctcactaaccgtggcagctgggaatcccagggccctcacagctctcactaaccgtggcagctgggaatcccagggccctcacagctcttttctccctcaaattgctgctggctacagagaactgcctccaccaagggcatgcccctttcacagtgtggctcaggcctaataactgcatgagactgaaataccaaggccctgtctcaggttaggatgaccttgcagggcctcccagatgagtcctcaactggagtcagatttcaggctgcccagttgtgcccccccatacttccttccagagcgaatatctccaaacactactgtatgcaattttccctctcagagtctgattccagggaacacaaaatagaaaacagtctacaaggaagagtacggaagaagagagagcagcacagagacaggactctggaatctgcaaatattcctgagcactgatgatcccatgagtggaaggaaaatacttaaggccaagaaaagaaccacccaaagacatttgagggaacaattgcagggcatgtgcatgcgcgtgtgtgcgcacacacacactcacacacacacacacacaccatcagaatagagtttgttcctacaaccagtgtggaaatgtgtctaatcagaggcatcaggttaactaatcagaatttctctgccctggctgagcaaagtggcttacacttgtaatcccagcaatttgggaggctgaggcaggaggatcacttgaggccaggagttcgagaccagcctgggcaacattgtgaaaccccatctctacagaaaacttaaaaaatatagctaagcatggggacatgcacctgtagtcctagctaatcaggaggttttaagcatgaggactgcttcttgagcccaggagttcaaggctgtattgagccatgatctcgccacacagtttcaaaaaaaagaaaagaaaagagaaaaaaaaatgaataagaaaagctctgccttagtatagggggaactaactatagactaaaatctgctcctatccctcctaggacaccgtaagagcaagttcagaaaggaacatactctcttcaagaaacccttctgaatcaaagaagacaaaaatatgtggagaaatataaaaatatcatgcacctaaaaagcaaaacttcacgatgtctggcatcttattacaatagcaggacaacgtgagtcagaagtaaaaaagttggtcagcgcatcatggccctgaaattgcacaggtaatacactttctagaccagaacaaaaagcagttgttgtaactgtaatccatttgtcctggagggtagagtattgatggaacaagttaaatggagacatgaaagacatttaaaaaacacctacatttaagtcctagaaatgaccacagaaatatatgaaatcaaagtactttgaatgagattgctggtatattacatgctgaaaaagaagagattagtgaatctgatgatatagtaatgagaactattcaaaatgaaatatgcaaaactactgaaaatgacaagaaaagagcatcgttgagttatgggacaactgcatgccaatgcaacctaaaataacgtaatttgtgttactgaaaaaaagaagttggtgggggtaggggagtatatagaaaaactacaaaacaaaataatgactaaaaatgatccaaattttgtgaacatcataagccatccattttcacgaagctcaaccagcccctgacaaaatatattttaaaatataaatacgttaagataacaataccaacacatatcataatcaaattgctaaagcacagtgatgaagagacactcttaaaagcagccagaaagaaaagacatgttagatataatactaagagcagagttctcattagaagcaatgcatgcaagaagacaggtagctacatctttataatattaaaaggaacaactgtcaaccctgcagtctttacccggtgaaatatctctcaaaaatgaaggccaaataaaacctttttcaaataaataaaacttacagaattgataaatcacaagccgtcactaaaagaaatgatgaaagacatccctcatacagaacaaaaattataccagatagaagtgtgaatctgcacaaagaatgaaaagcatcagaaatggtgactacatggataaatattttaatagtgcataatgtagaaataaaagggcttgaacagcactatagaacaactagacttaaccgatgcctgtagaactcttcaagcaacaaaagcagaatgcacattcttcttgcatgcacatggaacattctccagaaaaaccgtataaaacagattgataatttttaaaaagatagaaatcacacaaagtatgttcccaaaacaatgtcattagagaaatccaaaaaattgagggaagaccatgaaaactgcatgaaaaaaattgagatgaatggacaaatcactagaaatacaaattctattagaagtgactcaagaagaaatagaaaacccgattaaaactatagaaagagattaagttaataataataagaaaagccttcccataaggaaaggcccagacacagagggcctcactggtgactattaccaaatgtttaaagaagaattaatataatttatcattaaacttttccaaaatataaaagagataaaatcacttgccaactctttctctgaggccaatattaccctgataccaaaaccagacagagccattacaagaaaagataaatacagagcaatgaccttactggatatagatactaaagtccttaacaaaataccagaaaatgtaatctaacaagatataaaaagaagtacatacaataaccaagtggtgtttatccgaggaatgcaatgatggtttaacatctgtaattgaattaattaatagaaggcatcgtattaatagaagaaaggacgaaccatattgtcatctcaaaatcacttaaaatgttttcatgcaagcagactttctttcttgctgtttttaggccatcatgagaagtggagatggcatggggtagtatttcatgcaaagaatctggatattccatactcaactgtgaggatactttctgataaatgtaaaagattgtaatattacgtttctgtatgttcagagaacacttcctagacaagatatgtgtacagaaccgaaaggacaattaggattttggcaggcattgagtgaggagtggagtcactgcaagtgtcagtcagagaacaagaaagatgttaggaaccatgtatttctacctggccatcctactgggataccatccccttcctaacacatcacccatgtggcttgtaaaaatgtccatacttgaaacattttgtccacataattacaggtctagtgctggaatcaagttccctttgatgacatcaggacagttaaaggatctgcgtgtctaactgcccccaggtgatgctaacattgctgccctctgaggaccacaagcaaagtagctcagctcctgacctcctgctcccagcacaggtgagatgcacctcagctacatctgtgaagcccaggagactttctctccctcctcaggctccctggagtgatgacccaggactcatgcctctgcacatttatcctttccctcagagtttggggccttatcagtcctgttacatcttctcagcatctgaaaccactggagaggtggtcaccatctcctgtgctgacacagcagtgacattgggggttataattctgtctcttggtaacaaaagcaacagggaagagccccatatgactgaggggtgagatcaggaaaaagcctcagagattccagttctaatctcaggccgttctttgtattcttttatgagctagttagtcagctggtcagtcagctgtggccacaagaagaaatggaagagaggttcagaaaacagccctagagaccatagacccagagctctagagacagcaggcccaatgtgctacacagggccacagggaaaggcatcaggttcattagaagacagaagacaggagggcaggggatcccttagaccatgacttttatcagaatttcctcaggaaaagcagggcaagctaaaaaatttatgattggccagcctgaataatgtcagcaggctttgggctactaaggtggtctctagctgcttggtacctggccctgggacgataaaggcagaggaatattgtatcctgggatgcacaaaccagacaggggtggtgaggctctgaacacgttagtttccatatgaaaggcaggcttctggctgagcccattgctctttcaaggaatagagaactggggagacccaggaggggtggtcttttcccagacagaaatgttttttaagatgtcaaaatatcaaaatatatagaaaattatatacagttgacccttgaataacattggtttgaactgcatgggtccattgattttcttctgcccctgtcacccctgagacagcaagatcaacccctcttcttgctcttcctcttcagctactcaacccgaatataaaaaagataaaatcctttatgacgattcagttccatttaatgactagtaaatatattttctcttccttatgatttttaaaataacattttctgttctctggcttacttcattataaaaaatactgtatataatatacataacatacacaatctgtgttaattgactgtctaagctaggcctggctctgaccctgatcctgggagacactttaggcagattactctggaaataagtccctcagtctctgaccatctctctctcctcggcgggttctctgtcctcccatgggagctcagtgcccatggtgcagacagcccctctcagctgctcaggaccaagtagggaagctctgctctgtcttggtacccgcagaacccaggctggtgcccatgctgggactttaatgtggtgacaaaactcctcatgcagtgctgattgattctctgacagtgtctaggaatgtaattcccctgaccaggggacaggttgaggatgagtttcaggggggatgacaacaagacttccaatgacacagccacagggagaattgagatgcacaatctgctgtccccagcctggatcacacgctccccctgcatttaggaaagttgcttagaattaggctgaagaggtcaggattcagttttaacattgacctctctctcattttctcttttactctcttttctccttctctcttcctctctctttctttctctttctctatgatactgaagcccttattcacccccattctcagctatgaaatggacatggaaccctgacatcgtgagtttcctcaaggatcacaggagtggagtaaagatctgagccctgtctccaggtgtcctcaagggtctacatcacaggctcctccatcctgctcttcccttacacaggggctcccctcagatcctgcccatgcctaaatttaggccccatttctttgagacctgtggacacttcatcctgaggttcctgagggtttttctccctgctgacgggagatcccactgatcacatggtctgcttgttgtttctcaatcctggagcacagctgcaagtgtcacctgagacacggccaatcccccatacaggacagcagtgaaggtggaagaatcccagagtgaccgggtaccgtcattcattcaaattccatggggctcttgctgcatcactgggtgtcatcctttgggaacctggacttctaaactataagactcagagttagaaaacagaatcataaattccccatgtaagccactacttccacccctggtcctggactcagatatgttactaatgaggaacacagttcctcatagtggctgctgattgaggacatggtgggcaaactgtggttgatggacacatctgtcttgcatcctgcattggaacacagtcttgctcatgtctttatgagtgacatgtggctgttttcatgctgcaatacaaggcttggttgtggtgacagagatcctatggtctgaaaatctgaaatactatactaaaggtcccatactgtatcatgtcttctacatgaattatctacaatagacaaatccatgcaggcagaaagaagatgagtggttgcccagaattggagaaggtgatgaaagaggagaggctgctcactgggtgcagaattttcttttgggtgatgaaaatgtaggagaactacacacacagctggtggctgcccaacaaagtgaaggtgctaagtgccactgcgttgtacattttgaagtgattaattctaggttatatgaattccacacaatacaaaactatgattttcagaaattgactgttataattgtgttattatatctacaactttatgatggcactaaaggaccatgagcagtcaatgcaaaggatccagacaatatttcaagggctcttccagagtaacaagacatgaaaaggcagctctggttctctcttgcctggcgtattttaccctcggagttttttgtttttttgtgttgttgttgttgttgttgttgttattgttgttgttgttgttacagagtctcgctctgtcgcccaggttggagtgcagtggcgcgatctcggctcactgcaagctctgcctcccgggttcacgccattctcctgcctcagcctcctgagtagctgggactacaggcgcccgccaccgcgcccggctaattttttgtatttttagtagagacggggtttcaccgtgttagccaggatggtctcgatctcctgacctcgtgatccgcccgcctcggcctcccaaagtgctgggattacaggcttgagccaccgcgcccagccaaccctcggagtttttatgagcaccgaagggtgcagggagctggaagctacccaccaggtgcctggctcactcatgtctgggtgcagcagctcccccaacaggcagctggcagaactgaaagggaagagctatatccttctgagcccccacaattgtggtgcaggattgttcccgacactcccatccagtctgcttgctcctgcacacttagaaatgatcattatttctgcccaggacctccctggtcttgctctcccctcttcctccccaggcgaccttgggaactttactcaccctctggcccttccctcctctgtccagtgttttccccacccactgtgatcagctcagatcagcgagtctgtgggacattagggatcagtcacccatgtgaggccctcgacggggtcccaggatggagcagtgtatgtccccacaaggctgcttattgcacaagtaatggaggaacaaaggggtgggtaagccccctcctgggcagcttcagaccctgctaaaataggaaacagcctggggcaggtctgaccccacttgtgtctctcctgcccccaccccagcagcagcgtcctggaggccataccatgtgctaagcagatgccaagatcacgtcattcatcatcacctggaaattcccctaaccacaccttaatacgctgcactcgtgcctcagctaaaagtatcacacactgcattgcaatgagtttggatcccagacccccttgatgtttgtcactgctctttcagatcctcgaaaacacctacccctccctgcaggtcagtgacagactcttcttcctcacacttcctttcactgtttcttccttcctgagagcagctccagagactcctcttcagggaggcgccccaacctctgattacacagcagtctgcctgtcattttctgtgtatgcattctattaatgatctgcagagcacctaaacttcatgcctcttttcctaacatgtttattaattgattttctggtgctaaatactcctacaatcaatcaaaaatgcttctcctctgcttggacactcatgagaaacagtcatgaaccatttgctattttatcctcaaaaagtaagtgtggagttcactgctgttccccacatactcaccaaataatgagaaacccagcaattacccaactttctgctccaccatcatgacacagtaggcttttctttcatttgtgtggacttaagacctcaggatggctgctgcagctccagctattatacccatattcaagagcaaaggtgctgcacgaaaacagtctgtttatttccatcacaagagaaaatgttccctgagaagatctccaaccacctgacccttacagccctggggccagcatgggaccatgtggtcagtccaagccaagagtgaccagggaaaacaaggatctttttgtaaataaatagaggagaaaatacacaggtagaagatggtgcttctactacaaactgtttctattacacagccccaacccccatgtaggaaactcctggggtcagagacagtctttctcgtgctgaattcccaggatggaatattgccggatcagagtgggtctcaataaatactggctgggtggatatgctcctgcctttgtttttggggcaggagccaccactgcctcatgtttttctacacctggagccatgaaacttggtgtctgaggtctgcggcactatatgcagagccttggtaagatgcactggaccacttaccaacccagtgacagtagagggatgtcttaggtgggccctacccattttcctccaataggacgtgctcataatttcatgggtaaccgagccccttatgcctggtattgaggcatataaggccaaataaagaagaggaattcctctcttggaaccagcagtccatggacaagggaatcagggacctgagcagcaggttctgaatccacacctgatctggggcaggacccagaacctatcaaagtcttctgctgttaactatagaatgggctcacaaaatgcagacagaatgatctgtgaactccacctggcctggctagctgagaaccaaggccaagacatagtttaaggtaaagatgttggcccagactttgggaccagcaagtgaaggagaattctgtgggctgaggtgggtctgtagggtcctcccctcccctctctgtgtcccttggggctgagcccttctctggaaactacaaagctactccagtagcagcccctgattctgctgacttgcatcacgggccgctttctccatcaaggggataagagaggcctgggagaaacctacccgccctgggccacaggaagcagcatcagggatgtctcagtcatggactggacctttctcagcctcctcgctcactgcacaggtgctgccgccagagtcccagccacccgcccagccccgggctgtgggaccaggctggccttgattgtgagctcagcagggctctgcctgtggtggaaaggatgctcatgaccttgctgcagggtgaggggctggtaaggttgaaatcttcctgtactcctgtgctcatgggcactctgaggggcacagtcaggctccctttcatcccagaagctctgtcccagccaggcaggtgcaaaggaatcctgaggatcagctcctcagcttcaagccttttctccctcatctcctgcaggtttcatggccacatatgagctgtctcagccaccctcagtgtcagtggccccattacagatggccaggatcacctgctgtggaaatactgttggaggtggatatgtttattggtaccagcagaagtcaggccagacccctgtgccggtcatctataaagacagcaagtggccctcaaggacccctgagtgattctctggctccaacttgtggaacacagccactctgaccattagtggggcccaggccagggacgaggctattactgtagcacctatgatggctgagggagcagcaggcagtggctcacagtgaaacagacagatggggatgtgggacaggaacctctaatataactaggctcaatatctcacatcctctctaagccaggatgtccaacattttggcttctctgggccacattggaagaagaaaaattgtcttgggccacacataaatacattaacactaacaatagctgatgagcttaaaaaattgcaaaaaaatctcataaagttttaagaaagtttacaaatttatgtagggccacgttcaaagccatcctaggctgcatgtggcctgcaggctgcaggctggacaagcttgctctaagcagtgaccatgactttggtctcagttcactcaggtggtttctcatggtagccaaagcagcaggagaaactgtcggatttctatttaaccatgaattttacaattacattcattgtaaatccaaacatcttgtccctttattacctgggccctacagagactagtgcacaggttcatgggataagaaatgtctccagagagcttggtttctgcactagagacagtcgtttccctccctttcaacacagagtgtggcaggaaaggaaccagttctctgagctaaccctgagaacttgggcttgagaaaaagaaagcattttgaaccagtaggattgtgcccacagaatgagatgtgctactctggcccagcccaactcctttcatttcaggagctctgtctgggccaggcaggtgcaatggaatcctagggatcagctcctcagtttcaagccttttcttctctgggtgtctgagaacaggagttgtcttgcacgtgcacatgagaaagaagtgcacacacgactctcaggtgtgagcagcaaagacagaacaaacctttccagaaggggcaaatttcattaagatgacagggccttgttacacaaccccacatgtctggactgggatctcctattggatcttgccataaatgcaaggtttcttctcccatcataaattcctgcattgcagtagacccagctgggttctagggctcaaccagcagggcactcccaccactgtgtggacctgctgcagagccttcctgctctaggacccacagacatgcaacttttctttgtttttgctatttgggttggagcaacatcccaagagtgaataatgcttcttccagaatccatcatgaccatatatacttcttgatgcgaagttaggatgtaataatgtgtcctttttttctatgggaggtgctcagctgttccaaacaagaagaccctaaacatttctgctcatatgaaggatgactccctaggtttgctttcctattctctgaatgcatgggtctccccaaatcttccaatgacctttcactgcatgcacatctcatccaaataccaccacatggtggatgcttgggcatggtagcgggtgcctgtaatcccagctacttgggaggctgagacaggagaatcacttgaacccaggaggcaaaggttgcagtaagccaagattgcaccactgcactccagcctgggtgacagagcaagacttggtctcaaaaaaaaaaaaaaaaaaaaaaagaaagaaaagtttatatttttgttctaatggttatcttaatatcttcattctataattatatgttttatataattataatagctatataagatataatacccctagtatgttgttttttggatattctacttgctcctgatggttaatttatgtgtcaacttggctaagctatggtgtcccgttgtttggtcaaatacttgtcaatatcttgctgggaggttatttcatagatgtgattaacactgacagtcaattgactttaagtaaaacagatcacccaccataatatgggtgggccacctccaatcagttgaaggccttaagaacaaaaactgaggtttcccagagaagcaggaattctgcttcaagactgtaacacacaaaccctgcctgagtttctggcctgctgactgctctacagattttaggttccagacttcgagatcaactcttacctgaatttatagcctgctggtttgccctacagattttaaacttgctagtccccacaattatgtaagccaattcctaaataaatctctctatgtataacctattggtttagcttctctgaaaagctttcacatccagtttcctggatgttaagaattactgaaactagctagtaacttactttttttttttttttttttgagacagagttttggtcttgttgcccaggctggaatgcaatggcacaatctcagctcacctcaacctccacttcctgggtccaagcaattctcttccctcagcctcctgagtagctgggattacaggcatatgccaccatgcttggctaatttttgtatttttagtagagacacggcttctccatgttggtcaggctggtcttgaactcccaacctcaggtgatccgccgccttggcctcacaaagtgcctcacatgagccaccacgcctggctcctagtaaattcttcttttccgtgatgtgtctcttacctctaataatacttttcttcttaaagtctacttcattaaaaatagttatgctgggcatggtggctcatggctgtaatctcggcactttgttggaggtcgaggtgggtggatcactgaagcccaggagttcaagaccagcctgggcaacatggcgagaccctgcctctacaaaaaatacaaaaattagctgggtgtggctaatataattctaagttggcacacttgtagtcccagctacttgggatgctgaggtgggagaatcgcttgagcctagaagggagagattgctgtaagccaagatcacatcattgcactccagcctgggagacagtgaggctctatctccaaaaaaaaaaaaaaaaaaaaaaaaagttatacagctttcttggttagtacatgcatgacatatttttcattattttctacctctctgtatccttatataaaaggcattagttgggttttactttattttcaattattttaatttttattgtccttttaaatgtaactaatgatttatttacgttgaaacccaccaccaatttgttttccatgcctattctatttcttcttatctcctctcacatcttgttttggatttattatttttattatttaatttcctccttctctattagtttcataactgtgcagtcttagagttattttaaaagatgacagtggattattttagagcttacaacatgcatccttcacttatcaaagcctaacatgagctagtactttttgttgtggttgagacagagagagtcttcctctgctgcccaggctggagtgcagtggagcaatcttggttcactgcaacctccacttcttgggttcaagcaattctcctgcttcagtcacctgagtagctgggaccacaggtgtgcaccactatgcccggctaatttttgtattcttttttagtagagacagggtttcaccatgttggccaggctggtcttgaactcctgaccttaagagatctgcttacctcggcgtcctaaagtgttgggattacaggcgtgagccaccacgcccagcctatgagttagtacttctatcctcttcctagtcagtagaagaaccttggaacaggaactaaatttacccccagtgacttatatgctaatatttttgtgtattttaaacatatgtgtgtgcatagatgtatctgtgtgttttttgtgtttttattcttatttatgttgagagtgtagagctatgtaagagtaaagagaattgtgtaatgaagccccgagtatccattcaatttcaacaacaatcttatggccaagctcatttcatgtatactctttcctgcttccctctaccccacattatttcagtgcaaatcccagatatataactgtacccatacatatttcagtatgttttatttattttaaaccccacaagatatcattttctatactactgtaatttcataccaataacattcatttagatttacccacacatctacctcttctgttaccctttatttttatttataaaaatatctttgggaaaaaatatccttcagcacatggtcaaggatctcctgagggctatgtcatggacaaaatatacatatatattccatatatatacacacatatacacacacacatatatacacatacacacacacacacacacacacacacacacacacacatatatattccactttcacttttttgtttgttttttgagaccgagtcttgctctgtggcccaggctggagtgcagtggtgggatctcagctcactgcaacttctacctcctgggttcaggtgattctcccgtctcagcctcctgagtagctgggattacaggtgttagccatcacgtctggctaatttttgtttgtttgtttgtttttgagacggagtatcactctgttgcccaggctggagtgcagtggcatgatctcggctcactgcaacctccatctccctggttcaagcaattcccctgcctcagccttccaaggagctgggattacaggtgcatgccaccatgcctggataatttttttgtatttgtagtagagaccgggtttccctatgatggtcagactagtcttgaacttctgacttcaggcaatccgcccacctcggcctctcaaagtgctgggattataggcatgagccaccgtgactggcctgttttttttttttttgagatggagttttgctctgtcaccctggctggagtgcagtggcaagatcttggctcactgcaacctccacctctcgggttcaagcaattcttgtgcctcagcctcctgagtagctgggattacaggcatccaccaccacatctggctaatttgtgtatttttggtagagatggggtttcaccatgttggccaggctggtctcgaacttctgacctcaggtgatccacctgcctcggccttccaaagtgctgggattacagggaggagccaccatgcccagccattttcacttttgaaggatattgttagtgagcatagaattctaggttggcagatattttctttcctcagtttgaaaacatgattccttgtatctgatttctcctgcttttattgggaagccaattctcaatctaattttgctcatttgaaggcaatggctttttatgttgttgtgttttctgagatggagtcttactctgtcgcccaggctggagtgcagtagtgcaatctcagctcactgcaacctctgcctcctgggttcaagtgattcttctgcctcagcctcccaagtagctgggattacaggtgtccaccatcacacctggctaattgttgtatttttaatagagatgaacttttgccatgttggtcaggctgatcccaaactcctcatttcaggtgatccgcccgcctcagcctcccaaatgctgggattacaggcatgagccagcccccaaccctggcctgaaggcagtatcttttttcctctggctgctttgaaaagttttgtctttgttttgagcagtttacactgatgcattgaggtggctcttcattccatgacttgattcttttttgtccattttagaaaattgtcagctttatctcttcaagtattacgtcttccccatcctctctctactctccttatgagactccaatttcacatgacttatgccttgttaaagtatcccccatgtctcttaatccattcctgtatgttctatctatttttctctttgtacttcaatttgtatagtttgtatcaaactatctcccaattagccgggcgtggtggtgggtgcctgtaatcccagctacttgggaggctgaggcaggagaattgcttgaacccgggatgtggaagttgtagtgagccgagatcatgccactgcactctagcctgggcaacagagtgagaccctgtctcaataaataaataaatacatacatacatacatacatacatacatacatacataccagttcactattttttttatgtttgtgtctagtgtgctgttcaaattgagttcctaattccattttttttgagacttttttttttttgagtctctatctgttgcccaggctggagttcagtggtgcaatctcaactcactgtagcctccatctcccaggttcaagggattctcatgcctcagcctctcgagtaactgggattaccaccatgcctaactcatttttgtatttttagtagagatggggttctgccatgttggccaggctggtcttgaactcctggcctcatgtgattggcctacctctgtctcccaaagtgctgggattataggcctaagccaccactcccagcctccatttttttttttttttttttttttgagacggagtctcgctctgtcgcccaggctggagtagagtggtgcgatctcggctcactgcaacctccccctcccagttcaagtgattctcctgcctcagcctcccgagtagctgggactacaggagcatgccaccatgcctggctaatttttgtaattttagtagagatggggtttcaccatattggtcaggctggtcttgaacttctgacctcaggtgatccacccacctcagcctcccatagtgctgggattacaggcatgagtcaccacacctagtgcatccattttttgtagctgccagttttctgatgaaattcttaattatttctttatatccttgatacacatgtaaagaatttattttaaagtacatggtctgatgattttatattctggagatcctatgggcctttttcaaagttgtctgtgctttctcttgagttttgttcctgctgtcttatttccttgtttgcttggttgtttttaatttggcaatggaagttgtgtataaaaattgttacaaataattttttttttttgagatggagtctcgctttgttgcccaagctggagtgcaatgatgtgatctcggctcactgcaacctctgcatcccagggttcaattctcctacctcagcctcccaagtagctgggattgcaggcaggtgccagcacgcctggctaatttttgtatttttagtagagatgggttttcaccatgttggtcaggctggtctcagactcctgacctcgtgatctgcccacctcagcctcccaaagtgctgggattacaggcgtgagccactgcgcccagccagaaataatttttaaaaataatttcgagcccaagcatgatggctcatgcttgtaatcccatcactttgggaggctgaggcaggcagattgcttgagcctaggagttcaagatcagcctgcgcaacatggtgaaaccccatctctacaaaaaataaaaaattagctgggtgtggtggtggtgtgtgcctgtagtcccagctgtttgggacgctgaggtgggaggctcacttgagcctgggtgatcgaggctgcagtgagccatgatcctgagactgtactccagcctgggcaacagagtgagatgctgtctcaaataaataaataaataaaaataaaataatttgaggcctagggctctgaaattctgagatctcctttatgcatttgagtgactgagatgatctgaagctggatccagtgctcctgagggctgctttatttctggttgactgtgactcctagagtaagaaacctgcaccccatgtgtggggtattatggcatcccctccctcagccacatgagtaagtcaacagcactgctctagaccaggtgtggtggctcacgcctatagtcccagctactcgggagactgaggcaggaggattgcttcaggccaggaatttgaaaccagccagagcaatatattattaggttggtacaaaagtaattgcggtttttgcctttaaaagtaatggcaaccctgtttcagcaaagtaaaaagcaaaaaaaaaaaaaaaaaaaggaaggaagaattaaaaaaagaatcagctgggcgtggtggctcacgcctctaatcccagcactttgggaggccaaggcgggcagatcatgagatcaggagatcgagaccatcctggctaacacggtgaaaccccatttctactaaaaatacaaaaaattagccgggcgtggtggcaggcgcctgtagtcccagctactcaggaggtggaggcaggagaatggcatgaacccaggaggtggaggttgcagtgagccgagatcatgccactgcactccagcctgggtgacagagtgagactccgtctcaaaaaaaaaaaaaagaatcactgctctgtctctcagcctcctcttccaggattggccgtcgccttgaggggaatgctggccttgcctgtctccagccctgtacctctctgcctcctatgcctttaagcacatgttttctatttgctgggctgtgaaatctgctcttcatctgatggggtttgctttataggtgactagattcttttctcttggtggttttagatttcgcattttcacattgaccttaaatagtctgattatagtttgccacggcaaagaccctttgcattgcattgtttggggatatttgagcctcctctatctggatgtctaatctcttgttagatgtgagtagttttcattattattttattaatgggctggcatgtgggccttggttccaggcgggctcagaggggcagctgcctgatgtctgggcagcttctctttctgtcttttcttacctggactctgggttgcttgttagctgcttctgccagttctgagttttcaaggggagaggggcccagtgatggctgttctttgaaggaaagggaagaatgtctcctgtttaacatgtttctatgtttccagttacttggttagttagttagagccagggtctctcgctctgttgcgcaggctggagtgcaatggcatgatcgtggctcacagcagcctccaccttccaggctcgagcaatgctcccacctcagcctctcaagcagctgggactgcaggtatgtgccaccatgcttggctgcctttttaaattttttttttttaatacagacaaggtctcactatattgcccaggctggtcttaaactcatgggctcaagtgatcctcctgcctcggcctttcaaagtgctgatatcacaggcagggtttccattttttaaagctcccagcagtggtataaactcctcctttccagagaaagcgcactctgtccgcatccctcatgttgtcctctcctgcctctgcttagggttcactccgggggaaagtgccacttgagagtttcctttttatgtgtggttctgactgaccgctccctgctcacagatgctgcttctcagggtggggtccctgaggcctggagtgtggcctctgacgaccttcagggccaggtgcggaatgagagcctgtggccacatggcccccggtgggagacgtcccgccgccctttgcttctctgtgccactctggctgcacagttcagagccttgggaaacgttaaccagtaggacctagaaggggaggtgagaaggggtcaccccccaggtgtgcctgtggtgagccttcgtgctgagcaggtgcagggagggaggcccaggtgcacacacctgtgaagtaggggcagctggctgggctccttgacctgctccagagcttcttattttctggccacttcacctgcagaaggcccaggtggctgtagccgctagggtcccttgcagtggaaatgatgcctgtcctcagcccctctctaggcctggcgctgtgctcagcaccgtcgtgtgtgtgtatgtatatgtgcacgcatgtgaatgtgtgcagacatcatgaggtgtggtccctgctgttaggcagcttgccttgtggctgaagtgaaccatcacctgaatcaagggatggaaacacaaggccagatgcagtggccttctatggagtcagacggtggctccgtgacctggcttcactccagaactacctggggtttctagctgtgcaaatcccaggtcccactcagattatgagtccagttctctgcaggtggaacccaggaaggtgtatttttaacaagatggtactgctcattcacccagcccagccagtggtcttggcatacccaggaaccgctgacatagagcttgtgctccccataaagtgggaaacagagcgttcctgggtgggggacatgtggcttggtcatgacagtcagggtgttacataccaggacagactgtgttcgggtgacattaaggacaagctcctgcaggctagctgcctggatagtgctggctgggggtagaagttagaggggtcacagaggggcttcctcccggccccctcatcagctgcttgatttagggcttggttctgggtccttctgggcctgattctgaaccatgggactggtgtggcctgcaggctcctcccgccacaagctgttcatggtgcagggggagaacagtgtccacaattccccagacagcagctgtggatgccaggcccccaggagttgttactgaagttgctgctggacagctcgcctttcactgagctccacatagcacccgtggtgatgggagccggatggagagagcctgccagcctgcacatcagctcccaactgggcggggcagagggaggagggggtggggaccccaggcagcagggctctgggagcagtggggccctgggttccaggggtgtctggcaggcccctccttactctacgtctctcagcctctggatggaggtgctggccgcagtcgggctctgcctctgactaagggttggggaagtggcgggtgtgggctgctgccccgtggggcctctgaacagaccccagggcctctgccaatcatgactccttcctttcagctggacccacaggccctgcaggacagagactggcagcgcgccgtcatcgccatgaatggggtacgtgtccgtgggactctcctggcgcccacttcccccagaaggatagggtggcctctgttcatttcaaatcagtcagaggtggctgagcctgaggcagcatctgagagggagcctggttggagaagggagggcccccaagagcagaatcaccatgcacgggaatcgtcattcattggctggaatgcagttgccagccaggccctgagcatccctcctcaaacaaaggtctcatggcaccaccaggacaggtggggcctccactcagggacctgggggctgcccatagaaatggagacccctgatttgtctttaggtaccccagaaaggtttaggccttaaaagcaatgacacacccaaaaaggcccgggtataaatggtaaaatgttaatatttgagattcttggctttttcttacattattctgtctttcctacttaatttttaattgttactaagagaaagctggtcacagtacactataatctcagctactctggaggctgaaccaggagaatcactggagcccaagagtttgattacagcctgggcaacattgcaagatcccatatcttaaaaaaaagtaagcaagcaagagaagcagcggggattttaggaggtgcttctgcagaaaccagtcgtttacatcatcttcaacaatcctggctcttgctgaagtagactaggggcttccccgaggggcggctccacctcatgctgagacctctgcatgccttgggggtggaaatatttgatgagactcccaggggtccttgggaccttgggctatgaggaccagaaggattagaggactgtgccccttctccccactgtagatcgaagtaaagctctcggtcaagttcaacagcaggaagttcagcttgaagaggatgccgtcccgaaaacagacaggggtcttcggagtcaagattgctgtggtcaccaagtgagtggggaggggcttgggctcacgcactgagggtgcctgtcccttcagctgtttctgcagaaaagagcatgtgtgggtctctcctctctgtgcgtggccactgcacggtgaggtcaggccccagggaacacggcgtcttcagctacctcctgtgtttcctgcaaaccagctcaggaatgtccttgccaccttgcttggaagcagtaggctggctccaggaactgcccaagtgcagggttttctgcccttgcttggaattagtcacggtcccagattcctgttgaatggttgtaacccctgcccctttgtcacgagtcagttgccaagagaagcctgtttgttggtttgagagcagttcatgcagacatagaccacttcctctgagaattcatttgcctccctaggatggaatctggctgggcctctgaccttgctggtcacgtgggccggggcctccatcagtcataccctggactcctatctgtgtctaaacaccacgccccacccccactcgcatagcactctgggagggctgtgggcatgagcagcgaggactccatcagcagctcccccagataagccctgctaatgagggggcttgcgaagcagctttgatgtgctggtaaatccaggtgcaaaacagaactcaagttaaggcctccgcacagcactgcgttctaactgtgaaggattcttactctagtgtcctgtgtggaggtattggaattgtccattgctaagactcagaggagaaaagcacttagcatcgcaggacttggagcaccggtgctgaggcaacccttcattcattcgtcggatgtgtgttaaggcccaggcccagggcaggggtcagggattctcctctcacacagcacgtgggtggcaggaccaacaccgggtctgacctcccagacgggggcacaggctgctaaccccaggcctggaatctgtcagatgcccttcccgtgctgacttgacttagacaggcctcctgaccttcccgcaaaggtcatgtgtgattcgcaggggttctggccgcttgaaaggttcctgagaaagtacatgccatgaggacagagcttgcagagggaggacaggcatgcagaaggctctgtgtgcagccccagacctgggtaccttcgtcaccgtcctcaccccacctccgggtgtgcacatagggagcaggtctcctgtgttatggcccaagcagggctgttaggacactgagaacattccctcctcccgcaggagagagaggtccaaggtgccctacatcgtgcgccagtgtgtggaggagatcgagcgccgaggcatggaggaggtgggcatctaccgcatgtctggggtggccacggacatccaggcactgaaggcaggcttcaacgtcagtgagtgtcggcctgcgcaggacgggatggaggtgtgggcagtggtgtccgcgatgagatctcagagtgctccatggcccaggcatgtcacatccttctctgtgtcttttcttcatttactgttttattattttaaaaaaagagaaaacaagagttgtacaaacagcttctatagaagccagtttttacaccatcgtacccactcatgccacttggtggagtggaccaggggcttctgtggggacttggccttcctgccttgggggtggacaggaggtggaagcccaggactcagtgcggtctgtccactgccctgtatgaggatgtggtgggcagagggcactgatgaaattcagcgcaggccggggctgcagcatctccgcctccatctcaccaaccctcacaggctttgaaggacccagactggcctcaaatgccaggggagggcactgagaccccagagggtccctcccagcatcttcaaagcaacaggattttgtgcctgcaggcccttctttgcagcacacaccacccaccctgaccaggacccctagaatgcccagcatccctgggagggccctgtggtagtttcagctccctctgggggcccagaatgaacctggcctgtggtgaggatgtaagcaccaatggccaattgggtccaaaggaagacaccggttcaaacactgaaaccaatcagattctcccacggccttcctgctatcagacgacactggtgcaggggtggttgctatgtacagggcagagccacccaatccccacgcaggcgctgtgtcctgccatgctggcctcctcctggccatcacatcaggccaagcaggggagaggaatgggaatgcccacgcacccctatcaactctgcagacacagaaccatgcacagctcttgggaggagtcagatgagctgctcaaagcccaggagggacccgcacagtggtcagtgtggcagggacggtgctttagccaaggcagggatggcgggtgactcactcaggatcttcaaggaggccgctgcatttccatgctctttccagataacaaggacgtgtcggtgatgatgagcgagatggacgtgaacgccatcgcaggcatgctgaagctgtacttccgtgagctgcccgagccccttttcactgacgagttctaccccaacttcacagagggcatcggtgagcactggaggccttggcctcgtgggagatgtctcccccatgtgcactgctgccctcggaggctgtgaaaagcgaggtgtgggaacctgagttgtaacccctctgccatggtcggcattttaacccaacctcaaaaagcaggggaccagaaccgagcctgtcctggaaggccttgcccatccccagagggctccccatccctattcctcaaggaggccaagtgggtgaaatggtcagcactgccgtgctgtggggtcctaaagtctgctgtcctccttcctgcagaccagggctaaacactggtgcccaggtgctcttgccatgggtcctggtccagccaagcatggtttcaaacatgacctgacccttagtcaacctggaggctgatgtctagagtgggcgctggagcgtgcagcacctgtggcctctgcatcacccttagggcaggtctgcctcccgggcccatgcacagaggacctggtctcccagcctgcaggtgcccctgtggtgtccaggacgacgagggggtctctgcgtacttggtggggctgggaccctcccacttcccacctccttgtgtccctcactccgctgtttcattccatgctgagcctcccctgccttgggctccctggggagggggtggtggcaggagttgcccaagggctgctctgcccatgagcagctgctctagcggctcctcctgctgctgttcgccaggtgctgctgacccctgcgaggtagagaaaaggcgttcaggtggttcacaccccacacaggtgcccctcacagggtcctcactggcggccagcgctgtgggtgtgacgatgatgacaagcctaaactgcgcaaggactcgtgtcccgggcgctccatgtgaccacctcgggagaggtctccggcttgtcgtaacccaggggagtgacccactgcctcctgcagctctttcagacccagttgcaaagaagagctgcatgctcaacctgctgtcgtccctgccggaggccaacctgctcaccttccttttccttctagaccacctggaaaggtagcccagctctcttgtggctgcccaggactccaggtctccaggccgttggggtgcccctctgctcccaccagacccccagcaccaaggaccttttcccccgacccctgtctgcagtaactcactgcttctaaggactagcaccactgccacccctgcccctgcctctcctctttgccacccgcctccctctgcactgtggccttaacaaagagctcagagctttggccgtggccagcagtgcatttggaccgcccccacttccctcccaagcacatcatgaagacctccccatcagcccagagctggccccttgtcccgggccactgagacccagaagtaccaaggctggagtcagcttgcagcacagccagggtcgaggtcactccctccctgaggactctagcatggcacagcccctctgcctctctcctggtggtggcgttgaaacagcaccctctgcttcggtcctctacagggtggcagagaaggaggcagtcaataagatgtccctgcacaaccttggcacggtgtttggccccacgctgctctggccctccgagaaggagagcaagctccctgccaaccccagccagcccatcaccatgactgacagcaggtccttggaggtcatgtcccaggtatgggaagacagcctccagcccatgcaaccccagcctgacagaggtggcctctgcctgccccacccccagtcctgcccatcttcccacttgcattgtatgtggtggtggctgagattcagagagagggacttgcctaggtttgcatggatgggagtgatagggggtgcccaggccacctcctggtcctgctggtgcatcttgctgggggcttaaaaccaccccaagtgttcgggtgtggtggctcatgcctgtaatcccagcactttgggaggccaaggcaggacaaccgaacccaggtgtttgagatcagtctgggcaatgcagcaaaccccatctccagaaaaaatagaaagaaaaattagtcaggcattgtggcacacatctgtaatcctaggtatctgggaggctgacacaggaggattgcttgagcccaggagttagaggctgcagtgatccatgatggagccactgtactccagcctgggggacagagcaaggccctgtgcatctctaaaataaataaccaccccccacccaacaagtcatgccttgtcaggaccccaccccacccccgtctcactgtaaggggttcatgacaccagcaggggtttctagcacctgaggtggacttgggggcttgggccccaaagacctccccaccagcagctgtgagcccccctctgagccactctcctcttccccactctgcgagggcaggtcgaggtgctgctgtacttcttgcggctggaggccatccctgccctggacagcaagagacagagcatcctgttctccaccgatgtctaaaggtcccagtccatctcctggaggcggacagatggcctggaaacctctggctaatcgggccatctgtagagtgggaatcaagattttctgaggcatccttgggccacccccaggtgtcaggccatctgccaagagacagtggcccaaagcagaaggacaggtggcctgggcagatcccgcccaggtctgaaagccccaggctggcctcagactgtgggttttttatgtggccacccgagggcgccccaagccagttcatcttggagtccaggcctggccctgggagacagggtgaaagcagtggtttttatgaacttaacttatagagtctaaaagatttctactgaatcacttgtcaagaagcgccctctctggggagaagggaacgtgaccggattccctcactgttgtatcttgaataaatgctgctgcttcatcctgtgggggccgtggccctgtccctgtgtgggtggggcctcttccatttccctgacttagaaaccacactccacttagaacagggtttgagaggcttagtcagcactgggtagcgttttgactccattcttggcttgcttctttttctttccagaaggatttttgtgcagaaatgggtcttttgttgccgtgttagtcctccttggaaagcagctcagaaggcccgtgaaatgtcgggggacaggacccccagggagggaatcccaggctacgcaccttagggttcgttctccagggagagcgacctcgtcccccgatcctgaccgcccttccggcccacgctctcctgtttggcttccacaggcctggacttctctggcttctctgcccacacactccctgcccccagtgtccctgcccctgccccagcacaggtgacttcatttctgtcctctcagctcagtggactcgctcaacttttgtataagtctccacttggtggtagcagcttgctgatgacttgttttaaaactttcatcctaaataaccttttgatgcttgaatatttttaagttttatacatagtttctaatttttttcccagcagatccagatacctaataagatgctggaatgtaatccctggacaatccgtgtcctggcagcatttggtcttcctctaagcgcctggctccgctgttctcaggagtgggttctgaagtctctggagaacaggatacgtggagggttaggaaggggccaggcctagagacgggagactccctcccggagcaggtggaggcacaggaccattcgctaccccatctgccgacagctgcgggggagcccaggcattctttgtaagccctcctgactacctgactcaaagaaaacagaagcatggaggccgccaagtattttcaagaaataaccccatgaatattccatcacttttttagaaagaggggcttggggcaggcagaggagagaagggagagcaaactgagagccaagtttccagacagtcctgcaggaggagaggatgcagctccccagagggaagcaggatcacatttaaggaagtgtgtggggtccctggatgacaccagcacccagtgcggctctgtctggcaaccgctcccaaggtggcaggagtgggtgtcccctgtgtgtcagtgggcagctcctgctgaacccgcagctcactggggagcctgacagtggggccatgcgcctgacactcctctctgcttgtggacctggcaaggcagggagcagaaaacagagccccttgaaggcttcctgtctgcgtctgtgtgcagtgtggatttagttgtgctttttacttgctgggagagcacagccaccatttacaagcagtgtcaccctcgtgggtggcgaggacagaacaggagcctctgctctctgtacctatctgggcccggtgggctcccttgtcctggcttccatctctgtctcagcgaccattcagccctgcgcaggaacacatgttgcttagaaaagccaaatccagccttgtctctgcctcctctggtctcatgatgtgcatctgttaccttgaaactggaaaccagtctatcaatgtctgtgccaattttttattccctccccaacctccttccccatacgactttttatttatgtaggatgtgtgctgtctaatgatgggatgaccacacttttccatgttctaaaagtgctcctctcccgcagggtcccagggctggtggttgctttgggtctacagctacgtcttacccgcctcctgcctcaacagcctgtgtggtggcaaagccggtgtggggctggggaacgcagcgttctccaggagggggacccggctctccttctgcagtgcaggcaaaggcctagatgccagtgtgacctcccacaaggcgtggcttccagactccccggccggaagtgatccttttttgccgcgggccctgagtttgaagcagcctggctttctcttggtaagtggctggtgtcttagcagctgcaatctgagctcagccacctacacaccaccgtggccgacactttcattaaaaagtttcctgagacgacttgcgtgcatgttgacttcatgatcagcgccgctgggaagaacccctgagccggtggggtggggctggaagcagcaggtgcagtgatggggctgggtgcccaggaggcctcagtgctcaatcaggccaaggtggccaagcccaggctgcagggaaggccggcctggggggtgtgggtgagcacaggcaggcaccagctgggcagtgttaggatgctggagcagcatccgtaaccccactgagtggggtagtctggttggggcagggaccgctgttgctttggcagagagagatgatccccactggggagaggctgttctgactctgcaggtgggacagggacagatggccaccagggtgacccggctggtcttcctttgctatgctaagccctgggacgtggaggattcctgccacacagcctgggcccggtttcttacctgtggccaccgctctggcacgagcccctcagtcttgggtggtttctgcctggtccgggatttggtgttcctgctgagtccagcctttctgccacctccgcatgggccgtgggtggtgttgtcagctgcctcccaccttggcttcagtagctcacccagctcacaggggagctgccctgggctggagatgggcatgcaccctgggtcctacttgaatgaatgcagcttgaggagagccggccatatacactgggccacaggttaccctcggcaatgcccacatcagccgtcagcctgagcctccccaggagagcaaggctcacacgacaaaggctgcccgtggccaatgaggtggctgagcccagccaggacctttctcggactcccgggatgtggctctgctcgtgagctgcctggtcagctctctcggggtgagaggggcttgtcacacgggcccctgcctgcagtgtgacccttctcagcttctctcagcagccctgcctgcggagtgtcaccgccaccatgatcatttccctgacactgcgagggtgtggggacgtcctgggtagagacagggcccgtggcagcagcaggctcaggggcgccctacactggtgggctggggacctggtggagaccacgccaagggctggacaaggggacgagcctccaccctggcctctccgcaggcctcagcagcccctcccacaggcagaagggttgacactgggttctgccctcactgcaagagctgcaagtgccacgtgctgttctgcccaatctggtgtctgcaggtgaggaaagggctgccgctggcccgtttctgagtgttcagcacctaaggatgacagcactgtctgtccctaccctccgggtcctgtttgaaaatcaaacccatgctcacaggccaatttttttttcttttagagacagggtctcactttgtcacccaagctggagtgcagtggtgcgattatagctcaatgcagcctccaattcccggactcaagggaccttcctgcctcagcctgccaagtagcttggactatagctgtgtgttttcttattattttgtagacatggggtctggctatgttgtccaggctattctcaaaattcccggcctcaagcaatcctcccgcctcggcctctcaaaggttgggattacaggtgtgaggcaaggcacccagctcagccacagagccctattgcatctctcttactaggagcaagagctgactgccccctcatccccattccagagtgttggggctgtgttcagccgaggccgggccactggcatggcccagggagcgggatcattcactgctgccccaaatctgagatcattccaccttgacaagacttcctcatccaatccctttacttgacagctggggaaaccaatgcgcacagagcacccccagctcactcggggtctcagagctgatccatgagcggaggctgagatcctgggatcttgtcccccagcctccctgcaaccttaatcccgttctgctgaaagagatggggccggacctcgaccagcagccctggcctggacatgactgtgctcatgcaggtattgaggccgagatgccccggcatcatatgtttttctattttcttttttttttttttgagacggtgtctcactctgtcacccaagctggagtgcagtggcatgatattggctcactgcaacctctgcctcccggttaaagtgattctcctgcctcagccttccaagtagctgggcctacaggcttgtaccaccacacctgactaatttgtgcatttttactagagacggggtttccccatgttggccaggctcgtgtcgaactcctgacctcaagtgatccacctgccttggcctcccaaagtgccaggattacaggcatgagccatggcgtcacttaaatgtagtgagaggccgggcacagtggctcatgcctgtaatcccagtactttgagaggacgaggctgtcagatcacctaaggtcaggagttcgagaccagcctggccaacatggtgaaaccgtgtctctaaaaaaaaatagaaaaaaatagccctgcatggtggtgagtacctgtagtcccagttactcaggaggctgaggcatgagaatcgcttaaacctcggaggcggaggctgcagtgagctgagatggcgccactgcactccagcctgggtgacagagcaagactttgtctctaaataattaaataaataaatatggctgagcatggtgccttaggcctgtaatcccaacactttgggaggctgaggcaggtggttcatgaggtcaggagcccgagaccagcctggccaagatggtgaaacactgtctctactaaaaatacaaaaattagccagctgtggtggcaggcacctgtaatcccagctacttgggacactgaggcaggagaatcacttgaaactggaagtcagaggttgcagggagccgagattgcaccactgcactctagcctgggcgatggagaaagactccatctcaaataaataaattaataaatacagagcaagattccatcttaaataaataaataaataaacatacacctgtaatcctagcagttcgggaggctaagacaggtcgatcacctgaggtcaggagttcgagaccagcctgaccaatatggcaaaactccatctctactaaaaatacaaaaattagccaggcgttttgatgtgtgcctgtagtcccagctacttgggaggctgagacaggagaattgcttgaacccaagaggtggaggttgcagtgagccgagatctcggctgcacttcagcctgggtgacagagtgagactgtctcaaaaggaataaaaaaaatacaaaataaaaaaaatgtagtaagatggcagagtcgtgccgcggaagcgtgctggtcctatccatgtagtgaaggctgatttcatacagaaatgtcacaagaactttttttctttttctttttttttgagacggagtctcgctctgtcacccaggctggagtgcagtggcgcgatctcagctcactgcaagctctgcctcccgggtttatgccgttctcctgcctcagcctcccaagtagctgggactacaggcctgtgcagcagatgcaggggggccactaggcccaggcagtcttgggacttgtgtgtctcctgctgtgcatccatactgggtgctttagaaacggcaggcagaccagaagcccctgttgcaagtgaggacaaagtgtgggaaggccgtgagggtctgcagtccgagatggcctggtcctcaacctgcagtgcactgttgatgcactggaatgccgcctccttctcccagtccaggtcttcagcagtgacccggtaccccagctctaagggaggtggcagcatcaaaggctcccctcgcctgcgtggcagcaggggaaacttgcatctacggggcctagaggcctgggatatgggggagccacccctgggagcgagtgtctgccctggtgctgtatctgccgtcttttcacactgggtgtgacccgaagagacagcctgaggtccgtcctcactcactgtgtttgaggaactgagggtcagctggcagtgggatgaggctggcccctcttccactttcgttccgggaggcctcccgtagagctgtaggggctcgagatggcatttcatttggggcacgagctggtccgggaggtctgcgatctctggttctgacctctgggcacctgctgcagctgtggctgaggcccagaaatgtgaagggcctccatccactccagtagtgaccccaacgtggggttcaatgcggaggggggaggggctgctgcggcagctgcaggagcagaagtgccacgccttgttcttctcatgcccgcatccatgcttgcagctgggaagggggcaggaatcagcgaggtgacctgggctgagtcctgggaatgggaagaggtggcaggaaggggatctgaggaggagaacagggggcctggtggtctgtgcttcttcccagacatgggagctgtagaggggacctctgcagcagatgctaagggggccagtaggcccaggcagtcttgggacttgtgtgtctcctgctgtgcatccatactgggtgctttagaaacggcaggcagaccagaagcccctgttgcaagtgaggacaaagtgtgggaaggccgtgagggtctgcagtccgagatggccttgtcctcaacttgcagtgcactgttgatgcgctggaatgccgcctccttctcccggtcaaggtcttcaacagtgacccggtaccccagctctaagggaggtggcagcatcaaaggctcccctcgcctgcatggcagcaggggaaacttgtgtgtactgggcctagaggcctcggatgtggaggagtcattcctgagggtgagtgtctgccctggtgctatatctgctgccttttcacactgggtgtgacctgaagagacagcctgaggcctgtcctcactcactgtctttgaggaactgagggtcagctggcagtgggatgaggctggccccctcctccgctttagccccggcaagcctcccgtggagctgtaggagctggagatggcatttcggttggtgcaggagctcgtccaggaggtctgggatgtctggttatatctgatttctgacctctgggcatggaggtctgtctgcagaggcccgggcccgggcacaaagggagagaggcctccattgtcccgcaggggccgaaatgcagacggtgcatccccggtgacctccgggacccttctctgatcaccaggattctcttggactctagggtccttgtcctgctcaggcatccctgccccgctctccttgagggccctcaacactatcttccctggacacaagtctggggacagccgggtgttgtggaccccaaaggggtgactcccggctcctgggccccacagagagtccatgttctcagtgcagtggctgagctggaggacgccctggaactcggagcacacagcactggcttgctgtggtacctgtgcaatcaaattgaaggcaggatcccaggaaggaacgcagcgcttgcaggatcaccgaaaaccttcttagagttgtcttgacaccactgatgtcaagtgtctgggtacttgtaggatggcctgccactcagtgcacgggcaggagcaacggggagatcccacaggcaaagtgaactgggggatgggctgaacgggctccaggcaactgagccctactggcaggtcctcggcctgggcccgaacaggaaggaggggcacagagtgcccaggtaaccgctcctgggagcagtggggaaccgtcggttgcttgaactctcgagagctgggctctgagcgtcctcgtccagccgccaactcggccaacggctaagccagcagtttcttctgttgccgggcaacgcgccttttaaacctgagggagcgggcgcgtgagcacatcacggcgcccgtgacagagccagcttaacggattaataagcgcagccaggtacccgcgcgaggcacttgctggcaatggcgggaggcggacgtggggggtcatgcaataggtactggaaggagagaggcgggcacaaaggtcgcgggaggaacaggtgcccacaatggcggcagatctgcccgtggatcactgaagattcctgctctcctgctgaggtggagattgcagtgagctgagatcgcaccattgcactccagcctgggcaacagagtcagactctctctttttttttttttttttttttttttgagatggagtctccctctgtcgcccaggctggattccagtggcctgatctctgggctcaccgcaagctccgcctaccgggttcacgccattctcctgcctcagcctctggagtagttgggactacaggcgcccgccaccacacccggctaattttttgtatttttagtagagacggggtttcaccgtgttagccaggatgatctccatctcctgacgtcatgatccgccctcccaaagtgctggcattacaggcctcggcctcccaaagtgctgggattacaggcgtgagccaccgcgcccggtgttgaaactcccttgaggcattttcttcggccttcgggtccatcctctgtctcctccttgacctcctcatctcctcctcgccactgccttggggaccttggccaggctcatggcatccagcagccactcaatgtcaatacctccatgttcatctctcagcccgcccttgcccgtgaacccatgcttatttatttattttttttatacgtgcacccatgctcttcaggtctgatgaagtatccaaaatcaagctcctgaccatcctcaaacctgccccttctgcagggtttacctcgctagtcggcgccatccttgattcttctctttctcccacccaggccatcatctcttgcctggttgatacccacagcctcccctttgggctttatccttatccccgtcatagctgccagagggaccctgtgaaaacactccccagcctgctcattcttctgccctaagcctgcatggcacagagcaaaagccagttgttatgggacctaggaggtcctgtgggatgggccccagcctgcatcttcatcctcttctccccaccccactccattcactctctgcctatcgctcaccagcctataccacctgcctcagggcctttgcactgaccatttaggcaacattccaggctcttttcacacgttgcctcctctgagaagccctccctgaccactctgcccatacctcatgcctcttgattccccttacctggcttgtggtttcagcactttccctgtgtgtgtttgtttttcttggcatgagggcaggacctaagtgtctgttccctgttgattccccagttccaggcatgcagtgcaaattctagaaatattttttgcatgaaggaatgagtgattgaatgcagcaagggtctggaggctgaggaccaggcagacagacattcagagttgctggaatgcgacagagacagggagtcagactggtcatgcaagatcctgggcctgcccttgggtcctggggagccacggaaggttgtgggtgccagagggttgtggtcagagccacagtcaggggccttctgagacctgtgtcccctccccaccctccctccccacctcctcaggccagctctggggtctcggcaggtggtccacaacatgacctctgagttcttcgctgcccagctccgggcccagatctctgacgacaccactcacccgatctcctactacaagcccgagttctacacgccggttgatgggggcactgctcacctgtctgtcgtcgcagaggacggcagtgctgtgtccgccaccagcaccatcaacctctagtaggggctgctgggccgcctgggtgggaaagggccaggggcgggtggcccagggactgcccacttatccagtaaggtggctccatcacctcttttcctggtgggaaactgaggcccaaccttggtagcttatcctgggcctctcagtgagtatgtttgagcctcagtgggtggatagggaccaggctgggccaggcaaggtcaggtgctgtctgacctggctgggcggtagctttggctccaaggtccgctccccggtcagcgagatcctgttcaatgatgaaatggatgacttcagctctcccaacatcaccaacgagtttggggtgcccccctcacctgccaatttcatccagccaggtatggggtggaggtctggggatgggggactggggtggagaggggcgggtgtcctgggcaggcagctgacgggcatccctgtcttctcccatcggccacagggaagcagccgctctcgtcaatgtgcccgacgatcatggtgggccaggacggccaggtccggatggtggtgggagctgctgggggcacacagatcaccacagccactgcactgatatgtgtcaccccttttctccctggccgtgcccaccctgcacagcccccaagccatgctgatcacactcccatgccccaggccatcatctacaacctctggttcggctatgacgtgaagcgggccgtggaggagccccggctgcacaaccagcttctgcccaacgtcacgacagtggagagaaacattgaccaggtgggccgggggttggagaaactgagtcacggtgtggggccccagggcatcctgggctggaggcctggatcatcacagagtggacaattgttggtgtcctctctctagtgcctgggccatctggagcccctgtgccatgagggccaagccccctgctccagtgagacccagcaggccccaacctgctcttcctgatgacctggcccgaaatggcaccacctgggctgaggcctgtgaccacacaggtgtggttcaggtggcatctggagccctgctcaggcttcccctctcctcccacccccaggcagtgactgcagccctggagacccggcaccatcacacccagatcgcgtccaccttcatcgctgtggtgcaagccatcgtccgcacggctggtggctgggcagctgcctcggactccaggaaaggcggggagcctgccggctactgagtgctccaggaggacaaggctgacaagcaatccagggacaagatactcaccaggaccaggaaggggactctgggggactggcttcccctgtgagcagcagagcagcacaataaatgaggccactgtgccaggctccaggtggcctccctgccctgtctccccactctctgggcctcagtgtattgtgtgtgaaatggagccatctgactggggaggaacagagaggtgggattcggagatcttcacaatgcggacactggaactagcctcagcatcttcagcatggggagagccaggcacatggctgggggccaggggaaggttcacaccaagccctgcccctttccaccctgatccctcggactttggggccaggccctcccttactggggctgggcagtgacactacctaggatcagccaccagggggtgccacgaccctggcactttcttaggcagagggtggccagctgatgctgggaacccgggcgccttctcagacccgtaggcgtccagctcaccctgccgatgacactggaggtgaagctgaggtccgaggaatggggactgggcaacaggctggaggaaaacatctcggtcagagccacgcccctggggggtttccaagagcaagcccagagtgaaacccaagcttgtgatcctctccagagggaggcctggttctcagggaacagcaaacgggaagatgtccccagatcccagggatcagggcttggaccagccggggacgcagcccagagggagtgggtccagaaggaaacagctagacacagcagccttcaccatccgcagcccctccaggcctccctcggggcctgctccctcctctgtgcacagttccaacacctggggcagggttctgggaagggctggtggaggtgggctggtgggaggcggtgatcacagcccagcacctggatatcaccaggggcactggggccaggggccaggtgaggccaggtcggggctatccttcaggagccccgaaaacctggtgattccaaagggcccatagacaaacaggtttttatgcctgtggagtcaagtcccactgggtctgagctctgcagggctgtgtctctggggctctgcaggggtgagatggaggtgggctcaaatggtgtacaagtcactcctcaatccttattttatttatttaatttttttaaaaaaaatttaaaccaatagagatggggactcactatgttgaccaggctggtcttaactcctgacttcaagcagtccccccatctcagtctcccaaaatgctaaaattacaggggtgagccagtgcacccagcctcaatccttattttggcctgagaggaaaggccgtggccccatttgcaggggagaagactgaagctggaggggcaggccttgctctgggttgcacagcagcaagagaagtgggagctggccacgaggcttcctcgactcgacacactggtggggtacaccctggttctccaggtcccatggggctcagcccaggactacctcggggggtgaggtacttaaatcctctccttcattctcatcgccctttcccccatcatttcctgaggaagaacattcagggacctgaaggggtggcctgcccctccacatctgtgggtgtttctcatcaggtgggacaagagactgagaaaagaaagagacacagagacaaagtatagagaaagaaaagtgggcccaggggacctgcgctcagcatacggaggccccacgctggcaccagtctctgagttccctagtatttattgatcattatctctaccatctcagagagggggatgtggcaggacaatatggtaatagtggggagagggtcagcaggaaaacatgtgaacaaatgtctctgtgtcataaacaaggttaagaaaaaggtgctgtgctttgatgtgcatatacataaacatctcaatgcattaaagagcagtattgccaccagcatgtcccacctccagccctaaggcagttttctcctatctcagtagatggaatatacaattgggttttacaccgagacattcctttgcccagggacgatcaggagagagatgccttcctcttatctcaactgcaaagaggccttccttcctcttatactaatcctcctcagcacagaccctttacgggtgtcgggctgggggacggtcaggtctttcccttcccacgaggccatatttcagactgtcacatggagagaaaccttggacaatacctggctttcctaggcagaggtccctgcggccttctgcagtgttttgtgtccctgcttacttgagattagggagtggtgatgactcttaacaagcatgctgccttcaagcatttgtttaacaaagcacatcctgcacagccctgaatccattaaaccttgagtcgacacagtacatgtttctgtgagcacagggttggggctagggttacagattaacggcatctcaaggcaaaagaatttttcttactacacaacaaaatggagcctcttacgtctacttctttctacatagacacagtaacagtctgatatctctttcttttccccacagggaccttcctggctgtgcctcgggtcaggaccagaatgacacccattcatttccctgggcctttgctccggtggtccctgcaccctggcctctgcctgacgaggatggtggggagaggaggggggacgtcccccacactgctgtctccactgttcctgctgcccaggcctctgggcttccaggactacagcgggtgggtgggtgggctggcctgagcccaggaatgcacttcagttcctggttgagcaatgtcactgaggcttgggagtcgggtgggggcgggaggaggcgtccacaggccccccctaccgtgagaggcagccgtgggaacagcctacctctaaacaatcactgcagcccaggctgaccaggggctctggccggacataggggcctggcaggctgtgtgccctgtaaggacacagtctgtctctgtgcctcagtttctctgctgcccagatggaggggcccagactccaggtgtacacatctggagcaggcagtgttcagttggggaggaagcggggaggactgtgggggccatgtgggaaggattccaccccacatcacctgcacccctgctgagcctggtcaacggagcccctcagtgggtcctcactctcctggctgcctcccatttaggcaccctgaggcctggggagaacagagccaggccagtgtccctagagaggctgcgctgccagcacagtagtagcggatttggattcagggaagcagacctgcagccagggtgggaaagagctgcaggcggggtggagcccccacatggcacagcccccctccctggaggtccatgctgcatttccaggacagcaagtcccagggatggatggtgcctggtgccaagggctagaggcatggtctgtctgcattccctacaggggcatcttgtagtcaccagcatttgatgctgtcaagtccccctgtcctctgtgcagactgggaagcccttggtcaccctggggggtggggggacccaggccaggctgcagaagcataaggacttgaacccgggtcctgagtgacaccaccttgggtcctcctccctctgcctctgttcagctccaccttgatgctgactaggctgggccatgcggagagggttaggggatagagatgagagctggggagcagggctccactctgggaggggggcagccttgcgggatccagggcagagttaagcggccccagctccgctttcctagagctgctgagaacccgggaaatggtgtggaggttccggggagccctgcccctacctggcaaccgcagtgcaacaggcaccaagttctcctgcacattgcgacagtgggaccctgggctctggcgggcggtaggtggggcctttggacctaccagcagtgagggagttaacacagcagctgacttctctaggcaaggaaaactcccctcagacgctttgctgcctggcctcctgccagcaacaagcaggagctgaaaactagaagctgaggcatgagtttggtcactccgtagtgtgcacttggtgagggcagcagctggccacagctgccagccgtctgtccattcgcccatctgtccatctggcagcccgctgttcagacctgtctgtctgtccgcccatctgtaagcccatctctgtcccattgtctatctgaccatctttctcttactgtcctctttgtctagctatctggcctgtctgtcgatccatcttcgtgtctgtcttcagcccccacctgtttgtccatctgtccaattacctgtgagtctatctatgcatcttcttgtccattcatctgcccacccatctgtccctccgtctgcccaccggcctcccctctccttctgggccgcagagccacggcccaggactgcagagccatggttggcctggtcctgctggggctggggctggcgctggctgtcattgtgctggctgtggtcctctctcgacaccaggccccatttgacccccggcctttgcccacgccgctgttgctgctgactccaaggtctgctcggatattggacagtgagtgagatgtgggaggaagctgggtggcccttggcagccagcccctcctggagaaggcgtgtgtgtgtaagcgtgtgtgtgtgtgagagattatgtgtgtgtgtgtgggtatgtgagtgtgagtgtggggtgtgggtgtgtgtaaatgtgtgtgatcgtgtttgggtgtgtgtatgtgtgagtgtgtgggtgtgtgggggtatgtgagtgtgagtgtgtggggggtgtgggggggtgtgaatgtgtgtgattgtgttttgctgtgtgagagtgtgtgtgactatgagtgtgtgagtgtgtgttggtgtgtgggtgtgtgtaaatgtgtgtgattgtgtgtgtgagtgtatgtgtgggtgtttgtgggtgtgtgtgagtgtgtgagtgtgagtatgggggtgtgggtgtgtgtgaatgtgtgtgattgtgtgtgggtatgtgtatgtgtgggtgtgtgtgtgcatgtgtgtgtgtgtgcgcgcacgtgcactggcccaggaagcaggagccgtgtgtgtgggcttcagcacctgcaggacttgagcgcaaggagacagcctcagggcccttgcacagaacaggtggcagggtgtgcccgtggggcagatggggacttggggacaatggtggtgtgtgagtccatacctggctccaggattcaggaggcccatttgcatatcccaggtgggaacctgtctggccccggctgaccctgctggccggtgcaggccccttcagtgaggccaattctccaaggctgcggtcttctcccagggtcatgggtgaaggggtttggaggctccctgcgtgggtactggcctgctggggtacacacaatgctgccatagccagtctgcccctacacccagcccggggccacatctcaggtctctcagtcctgaggagcccggtgccccacccctcacatcctctctccctgagtcagggcctgggtctcgtgagctgagtgactgatacttggtgtcctggatgagggcgtggtggagaggggccacagcgggtgtttcctgaccctcttccaggaaggtgctgctgccgctgcagggaggacacatacaggatgccccttcctgccccctgcctcccattgggcccacaaaagccagggcaagcctcccctccctgccagccacctggtctgcttcccagaaattctgtcttgcaggctgttgggaggatcccagtactttgtaaactaaagcaagggaggagtggccgttctctctctttgctcattcattcaccttttcattcattccttcttccctccattcccccatctgtccatccttccctgccctgattgctcatgccaccccccctccagcccctcctgacctggtcctttggtttctcttcagggctttctgtctcctcccacagggctgagaatggcagctcagggacaagtgggggctggggactgcttagtctccccagtggctctcaggggatttgagggtttgacgccagctgccaccccaggctgtgcccctcctctgctcaggaggacatgcagagatgcgacacccacttaaactcgaagttgcaaagatgcaaatgagactggggtctcaggcaccagagaccacccatgggcacgtggcttttgggagtggggacctgctgccacagatctctgaagagtctggacctgctgggtctccccgagtgactgtctgggggtctccatagcatgccctgctgtgtgcgcgacggtcactggttgggtaggggtctctactctaaagctccctctgccggcatcccctcgaactctcccttggtgaagagaggatgtggttttcccccagtgttttatcaaacaactctctccacttcctgttttaagaagctgggagtggaagagagcctggggctggccccagctgctgctgcgaaacaggggtcactggacgctgggaccctggccgggctggctggaggcctcaggaagaggcctgctacagtgtcatcctggccaagattcctccctgcagaggaccctggccacactgccacagggtctgctggggccaccagaagcccatgctcctgcctccatctctcccctttgtgctcacctctcaccaggaggccctcccagagttcagtctcctgcttttctttttttttttttttgagatggtgtctcgctctgtcaccaggctggagtgcagtggtgcgacctcagctcactgcaacctctgcttcgttggttcaaatgattctcctgcctcagcctcctgagtagctgggactacaggtgccagccaccacgcccagctaatttttgtatttttagtagagacggggtttcaccatgttggccaggatggtctctatctcttgattcgcccgccttggcctcccaaagtgctggcattacaggagtgagtcatggcacccggcctcatctcctactctttcagcaccaggttttattcttgggattctgctacagccgcagcccctgggtgcgagctcctaagctttctgcgagtgtggacccagcaccgtgcctagtagacatacaaaaggaacatggtgacagtgaggtctgtcatctccagcataatgactcttttgatccttgtaaaaaaggtgatttttggctgggtgtggtggctcacacctgtaatcccagcactttgggaggctgaggggggtggctcacttgaagtcaggagttggagaccagcctgggcaacatggtgaaaccacgttctcctgggtgtccaggtggtccaagaccccatgactatatcatgacaggaaagagagagttaataaatctgagggcataaaatgtgaacatatactgtttccatcccacatgaaggcacatgtgtctgagcctactctctgggaggaatagagatctcagtttccacatcagggttgcattctatgcacctgcagccatgttattctgctgtagcagatgctacacttggcaccgacattgcagatgggaccatgaccttactggagttgtagaaatctactttcaccttccagaatccatttaatgtttataggagctagtccaagaaattagatggaaataaagtcctgctacaacctgagaatctttaggcctttaaaggtaacactattacatgcaactcccaatgaagggtgaagcatgattattatttaccttttttgatggggtgaaatggggagagagtcggaattcatcacatacataaaaggcaggtcgtataaatgttagtgtttgtgagtcacaaggtctgtcttgcagcgactcagatctgcacttgtggcatgaaagcagccattgactgaacataaatgaagggatatgggtttgtttaatgaaactttatgtacaaacgtaggtagtcactatggtttgctgaccccagcttttccattgccccatggaactttctttgggatgcctttttgcagtgggttctaggtgagaaaaattggctcggatctggatgctgaagttgagactggtgctgtcatgtggctactgccctcgtccatcctgggtgacttctgactgttgtgatgagcagggccctttgtggctgcctagctcctggtgccaagaatgatgaaccctctgcattgccctctgcaaagcagaccacaggacagccaccctgaattgctcgttctcactgtgtccaccttgcctaagatggttgggcacattcactggctggttaattccagatagtgttatctcattaatgccaggcagtaccttctagaagaggctcctaccatctgcactagactatggagcttctccggggtgctagtgctctgtcacctgaatatgcttcagggatttgctaaacagaatgtccttcaggccctcccatagaacacagggaaacattttgttttcccttgtgtgactgcaaaagggaaaacaaaaataagcctgggaaagggtgatttaggactttgatgatgtcgaggctgggaactcccatcagagtttctatatatgatggggaggggccaattttttgaaagtcagcattgactggccattggacacaggtggccctacattgactctctcttgcccaggacctctcctcaaaaagtctcaggtgattcagccccacagcagcaggggcacgacaccttctgtcctgaaggctgataaccggtgatgtggacagctgccattcactctggggaagatgctgcctaattccacacccaccgcctgcatgtctagtgagagcctgcctattcctatggggacaccccaaaattagctccaccaagaagcctcctccacctccattctccacagaagacactcatcttatatgcttggctacaggtcctgtttgctctgctattatccctatcacctgtccctgtctgttcaattgtctcacatgagcagagagacgatgtctcattcagccttatttcccatgggtattaataaatattcattgagtcaattaaaaattcatgtaataacctatcaatgcatgtctctgtgtgaggtaaagaaagcatcctgattgtaaatataactctcatgttaaaagctgggagcagtggctcatacctgtaataccagcactttgggaggctgaggagggtgaattacctgaagtcaggagtttgagaccagcctgatcaatatggtgaaaccccatctctactaaaaatacaaaaattagcagggcatggtggcgtgtgcttgtaatcccagctactcgggaggctgaaacaggagaatcacttgaacctgggaggcgaaggttgcagtgaaccgagatcatgccactgcactcctgcctgggtaacagagcaagactccgtctcaaaacaaacaaacaaaagcattcttacagattatcttggcttttattcctttattctaccaataagttgttagcctctcttatgtgccatttgttacaaaaaatcagctgtcatttttatggagactgagaagtcccctgatctgtccattgtaagctgaagacccagtagggccggttttatggattagtccaagccccaaggcttgagaaccaggggagccactggtctaagactcagtccaagggaaggagaggatcaaggtcccactcatgcagtcacacacaaaggaggaattctccctgctggtgccttttgttgtatccacgccttcagtagatttgatgatgccaaccacacagaggagggcaaagtactaacttagtccaggcattcaaacatgaatctcatctggaaacaccctcatagacacactcagaaatagtgttcaatctgggcacctcatggcctagtccatttgacccataaaacttaccattactatcattaaaatggcatacgttatgtatattttgttaccataaaaaatttacattctgaaaataaagtacagtgtcttagctcatttgtgctgctacaacagaatacttgaggttgagtgatttacaaagaacagacagttatttctcacagttgtggaggctgggcagtccaagatcctggtgagggcttttatactgcattctcatgtggcaaaggcagaagggctggagaaagctaaaggctgcatgaagcctctttcctaagggccttaatcctctcaagagtgaggagctgtcatgccctaattgcctcttaaaggccatctcttttaacactaccacactggcaacatctgaattttggagaggacacattcaaactatagtagcaagtttaatttggaaataattctactcaaaaaagcattagaattgagtaatgaaaccctgtatatcccctccctggatgcaacaatggggtacgttgagtccaatccagggagcattctcgcttcctctctctactccatcttaaaaaattaacaataattttctgtccactccataatcccatttcaccaattgcccaaaatacctacagtagttatttaattatgtttactaacagaatcctcaagattccaacccttatatttgatttttacttctctctgatcgatctggcatttatcgacgaagattccatcaaaccctgggcttatgaaaaattttgcaaaaattccacagataggaaagtgttcattgtgtgcagcagaaaaatgttcatcatgcagagtggaaacatgtttatgtgtggcaagcaatggtaaagtgagtcctgcattttaaaatgaaaggacagtagatggaaattagaggtcacactgtgaaataatgaattctgttaaaggcaacaacataggttagtataaaaggcagcattatggtatttttggttagtaacttctctttggaaacctatcacaagcagagagactgaatccataattaaaaccttccagccaaagaaagtccaggaccagatggcctccatgttttttatatcagccatttaaagaattagcatcaattcttatcaaactctgaaaaactagaagaggaagaaactattcctaacgagcccaacatgaccctgaccgaagtcagttaaagaccctacaagatgtgacaactaaagaccaatatacctcgtgaatataggtgcaaacatcctcaaaatgtgtgccagcaacatgaatccaacagcatattcaaaagattatgtcatataactaagtgagattaatatcaggaatgtaaggagggttcaatataagaaaatgaatcaatggaatatacaacattaatagctcaagagagaaaatacatattccaaataacatagaacaacaaaatccaacaccttctctaaatgaaaaaaaaaaagcacccagaaaactagaagtagaaggaaacaacctctgtgtgataaaaggcgtttgtaaaaatcccacaacaaacttcatactcaataatggaagaccgaaagctatccctctgacatctccggatgcctaaccttatttaagtgagttcagcaaagttgcaagatgcaagatcaccatgcaaaactcattcatatttttttttggggggggatggaatcttgctctgttgcccaggctggagtgcagtggctcaatttcggctcacctcaagctccgcctcccgggttcacaccattctcctgcctcagcctcccgaatagctggaactacaggcgcctgccaccaagcccagctaattttttgtattttttagtagagacggggtttcaccgtgttagccaggatggtctcaatctcctgacgtcatgatccacctgcctcggcctcccaaagtgctgggattacaggcagagccaccatgcccagcaactcattcatattttatatgcaccagcaatgaacatctgaaaaagaagttttaaaagtaactctatttacaagaccaccaaaaagaatacaaataaatttatccaagaagatgaacttcttgtacactgaaaatgtcaagacatttctgaatgaaatgtgcagagatgcctcaggtggctcctgcatattccgcccctggtgaagcatgtttgcattttcttgggaactgagcacctcctgcttggtcgtaaggcagacaggccacacagagaagaataattcctccctttgggccagcagttcagggatcaagaaatcctagacctgaggagtaatttctgaatctacacctagaccaaggtggtgtctgagcctccagcagtcagtgaagagcaaccagcagtggtcaacagagagtcacatggcaaagccgcctggagctgggctggacctgcatgtcagggagatgctgacatgcagggagggtcagtgaccatgacctaacactggggggaaaaatgtccttctttttctagagtatcatcgttaacattgatgtacaaactcttttgccccatgtctcttacatctggctcttttagaatttgcttatttcacagcaacaagttcaagtcttatactacattgcatcccagcccacccaattatgctaaaactctggatctgtcaaacactttcagagcagcagatttgtacctggccctaaacgcatagtggggacactgaggcacagctcctagggccttcccctgaagctccaccaagggcaaaaacttatacaagcttcatggatattaaaaacctccatgttcacttagcaagggagaaattttattcaagttctgcagctcaggagctgtgctcaagagcaagacccagaacttctcaaagcctggttttggcacctgtagaatggagcccaaaaacgcagacagacttacctcggagctctatagggccaggacagcccaggagtaaagccagtttgagacacaatttggggtgaagatgtcggcccagaatagaaccaggagaggaagaagaaacccgtgtgctgagagtgggtctgctgggaccactcctctccttcctgggccctttggggctgagcccttctctaaaaaccacagagctactccagcagcagcccctgactctgctgatttgcatcatggccgctttatccagcaaggggataagagaggcctgggaggaacctgctcagcctgggtcttgggaagcagcatcgggggtgcctcagccatggcctggacccctttcctcctcggcctcctccctcactgcacaggtgctgcccccagggtctcactcacttgcccagccccaggcctctgggtccagcctggccctaacactgagctcagtagggccctacctgtggtgggcaggatgctcatgaacctgccgcagggcagggggctggtggggcagaaatccccccacactgtgctcctgttctcttggtgccctaagggcacttttattcctggggctcaggtcagttcaggcaagtggcaagatattctttggttaatccccagagtttcaggccttttcgctcctcttttctctccttgcaggctctgtggcctcatatgtgctgacacagccaccctcagtgtcagtggccccaggacagacacccaggatcacctgtaggggaaataatattggaattaaacctgcttaatggtaccagcagaaaccaggccaggcccttgtgcaggtcatctatggggatagcagatggccttcagggatctctaagtgattctccagctccaactcggggaacatggtcaccctgaccatcagtggagcccaggctggggacgaggctttcctctcaggtgtggggcagtggcactgcacacagtgacagaggcagacaaggaagtaagacacagaccccttccccatctgtgctgctgtcgtcctccagcccggcaacactgtggacaaagccatgagcatgcatgacccagttcacctggatctgagacccccagtctttacttccttcagccctccaggcaggctgtgcagagggggcatccagaatggatttagggctgaggtgaccaggatgtattggggttttgtggactccactgtgattcagggaaattagatcttccaagcagaccaaggtcaatatcctcagttatctctggatttccataggtggtgataggccagtccttggccgaaatgtcctgaatcagtccccagaactgcccagctgaggctcctgtcattctctacagaaaaactagtggagtggacactgtgggatcctcccagatcccctcttatgagctcacccacacagcactcctgggagcttctggcagctcagagctgttcggtgcagaaatctgcctcccccaggtttatgtctcttctcagggaggtttggtttcatgactgcctgtggccaaggtctcaagactcttcctcagtataacaggacctgaaaatcctccaagatccatagctccttgtagggctgactgaagcctcaatatgtgtcagggcctccttctgcctggtgttgcctccatcactttcttaatcatctgtgtatgatattctccatctcagagtctgtttccagggaacccaaactaagatcaccagccatccccaacacgggccatgagggagctgaagaggccactgtacactagaaagcatcagtttactcttaaattaccactgcgagtctgcaaatgcccagcgagacctgagtggttttttttttcatttgtgtgaaatgaaaagggagactgacatgccagatgctctgggttctgagggagagttggagtcagatcctcctgcaggaatccaggggcagcaggagcagcctcgccccatgcagggaccacagatgcacccagagggtgagctgcaggatggacactgcccacctccaatctgtatatcctgtgcaaaaaaatcattgttttcaccccttcttcagcctatcaaagttgtcacttaaaaagccactacatctcatcctgtgaacaggaaacccatccacatctccatcagccacataatctccacataaagattcttcaaaaaatagtaataatagctgtgaaaaagtatctaaaatattgcatgacaatcatacttagattacatatgaaaatggcactatttttgatatgctaggtaaataaaatatattatttgaagtcatttaccttcttctctttatatgtctaatgtggtgactagactagcctagtgggattcccattaggctcatcatactgtgattgaacagtgctggtctgcacctcttcaggttaacaggggctgtggagtgacctggtgcaggaaatatcatctccatccataggatatcagtgtgaacccagggagaggcactggtgcaagagagatgagaacaggggtgtggagtaggggactgagccttcactttgagccgaagaagtttcctttcctatcctcaatcctgaacaagagggatttctggacttctttttgttttcaagtttgtgccccttcagatttggggctgtctggaatcctgccaggggacaccgagaaaaaataggagtctcacactgactgttgtatttcatctgctggggccatcccaaaccactgcgtacaatttcctttcctggtgctcaaatagctgctccacgcacttgttgtggtttcagagatgaatctgggtgggaagacaggacagtgtatgttataatatttaaatggaacccaaatccattaatatttattttaatatggaacattaaaagagttttgtaataggcaatgggaaaaggtaaaaaagataaaagctttttgagaaaaaaaacaaaaacaaacttatagaatgtctatgtgtcttcagtgttgcagggttgagagagatcagctttatggtgccccatggatgtgctgagatggggaaaatcaagaaagaaggaagtatgtaccactgtgactcaacaaataaatcaaagtaaaatggacttaaatctttcaataagtcattcacaataaatatcactctggtgcacacagaaatgcctgttagcaaactttcccttccccctggccatgtctccatggatcacctgtgtgcagagtggctccggtcagtgctctgtgttccctccacagggctccccacaacatgtgccctgtgtggatgtgggtgcatcgcctggggtggctgatgtgctccagggattcgatgctgcagatgcctcagcaccaagggtgggggtgggaatgggacaaggctgcagctggggagaccaaggatcaaccacacacagcaggggtttccacggggtgagcagcctcatttcctgacagtagagcgagcctaaaggtaggtgccaggcagtggtatctgtggggtggcccaggcctggagggtcacagagacacaggcaccacacagcagagacactgagggccaggagctcactcaggtgagggacttcagcagatctttctctcctggtacaaagagatcaagttcctaccatcagaatagacaaacaaggactttaatctcctcagctgagccccactgtccagggaagaagtctctgagcccaggcccaggtgagagtgggatgaggagaggagccaggacacagattttcatggatgccccgccctcctctgaggcagagcggataagacagggctgggggcatacccagtgcttgagtctcaggaggcagcgctctcgggacgtctccaccatggcctgggctctgctcctcctcaccctcctcactcagggcacaggtgatgcctccaggaaaggggcctcagggacctctgggctgattcttagtctcctgctcctcaggctcacctgggcccagcactgactcactagagtgtgttttttcctttttccgggctctcgggctcagtctgccctgactcagcctcactcagtacccgggtctcctggacagtcggtcaccatctcctgcactggaaccagcagtgacgttgggcattataactatgtctcctggtgccagcagcacccaggcacatgatttatgaagtcagttataggctctctggagtctctgatcacttctctggctcccagctctggcaacatggcctccatgaccatctctgggctccaggctgaggacgaggctgattattactgcagttcatatacaagcagcaacattttccacagtggacataagattgattctcaggctccaagtctggccagtgagcttctttgagactccctgggatcccagcagtgacactgatcactattgctgtcccacacatcccaagtgatgaggaagtaagaccaaaaccctcctgagattcctgacttgtgtcctgacaccagggctgttgggattcctgtctttccttcaagattgttcaaataagcagtgacagtcacttccatgtgagatatgagaagaagaataattccatatgaaccaaatccacgaagcctacactgaagcctgccaagttctctgcagtccagcgcgatgaagggagcattttcgtgggaacttttgggaatatgaggggagccaggctcagctatgggttccagagacaaagctcctggatgtttctccccggccttggtccatcacctgctacctctcctcactctttccacagacactgccccaggctaagcccccacaggaccctaagcctattcctgaccctgagctcagcccaggtgatgcttcaggagatgggatcctgagaatgagccccaacatctctttaacctaaggtgtggggtcatgagacacctgttagccataagacacctgtcccccacctgctcaggagacagtggagcaggcaacagtgcagagagaaccagcaggagccaggccaggccctgcatccaaagcaggccccagtccccacagattctccagctctagcctgtggtacagcccccactttctgcaggctgaaatgggcttctcaggatgggcaggccatgatgggggatggcagtgtgtccacaggacacagccctgctgcctgcctgaccctcatgccccctccttccccaccctggttaatctccaccagaaagggcccaggttcagaactcaggacacctggatcagctcctggacttgcccccactgctctctgttctcctgagccacttagtctcttttggcctcagtgttacctgctgtgaagtgaggaggcttatactgaactgaggaagctcttttcttcattcaaaattaaaagacagaaaaacaatgaaagtcatgtaaattaaagcctgctgaggggatgtcatttaatgggcttcagtgggtttcagacgtggaacttcttgtcttttctctgcagggattccaagacaggggctcaaaagagcttgctttctgtatggtgggaacagcggtccctagctgagaataagcaggagattcccagcttcatcaggaaggcagactaggctagtgtagaaatcctctccgtacaaactctgagaggtgttgaataaaataaagataaacataatttcatgttttcatggtgccgatgatggtgatgttagctcacaactaagctgcagtgcctggaacatcaggaaatcacagtgaatcacagctgctcttattgggtgggaggtgcaccagtttgatgcctaagtacatagaaagcctgggtccctgtaggatggcacatgcatctctctggactttgaaagctttgcagaagagcttcagttgactcactctaattagtccggactgaacaaaaccactagaggagggcatttcaaccctgagacacttctatagccccaacttcctaccctgcgtgtgcgaactctctgtgctgggctgggcagggcagattgggtcaccctgcacagaatggggctggactgtctggtcctcaacttctgaggtgacaggtgctgtggaggcacgtggaagaaaaaagctcctgggctgagtctcctccaccagctgggggcagcagagctgcagccaggagcagtcaggattaaggctggggctgcccagctggggcaaagagaaggccagcctggcgttcaacaggtgtccaagaatcagtcttcagactgaaagtgagtgcagttcatcctatcccctcaggctgcagtgaccattctctgagggtcagactcatacagtgtcaccccaggacactgacagaagcccggcacagtgaaggcctcacctgggaaatgcagctggaggaggctgggaccaggtgtcaactggggcagcttactcaggaaggggatttctttggagacatcccaaggttgaggtgctctaggagggggcacagcgtgaggtgacggggctcccagggcccgggttcttcacccaggatggctgtctgagcctcctgccactctcagggccttgtccctctcagtccagcagcaacctggggagctgagccctctgtcctgggcacttccagatacaccatacctcacttccttctgcctcaccttccagctccaggcggactctgactcagggggaaactcctgtgctcaggggagtctcgggtgggtggggtgaagcatttgggatcctgatcccttcatggggcatccccagcatccttaaggagacactcttcagagggacagggcttctcacctgcctcagctctgaccatggggctgtccacactcagtgacaggacactgaccagggatctgactggagtgaccaggaacctggctggggcaaccagggaccacccaccctctggagctcacatgctgtgcagagaccatgaccctgggaccccttcagagaccatggggcctgaagttagattttcagtccagtgtggttttctcctgctttttgcaagtttacataaaacattgatgagaaaaacatacataaataacagacgagctgagggtgccaattgctaatctcttgtggcaatgaggggtgatgtagcaggagcagcaccatggctgaaatgagaccagaggccctgttgactccacaggggtgtgtggttgcttaaatgacccaactattcccactgaataatcagcaagtgtcccaatgacacagcacagcatttagatgaaatgaacaagaggggactgagtctgagggaccagggggaggaagatcatgggtccctgggccacctgctgctgagtcaggtgtcagcaagatctctccgcagagcccagctcagcccatggccaacctcctggaaggtccacagctctgctgagcctggcccaggacagaccccaggtcagcgaggtttgggacagtggtcatgagattaattcccagaaaggtgactgtgatcacagggcttgaaggctgcagctgattttctaatctgagaccctgcttcttcctcctgttgcctgtgctgccctcacagctggtttgagtgacatctctccaggaggaatcgcagaggatgtaaatttgcataaacgccaaacactgactgcccccaaaagctggagagggaataagagaggcctggggagcccagctgtgctgtaggctcaggaggcagagctctgaatgtctcaccatggcctggatccctctcctgctccccctcctcattctctgcacaggtgctgcccctaggctcagtctccacagaccccaagttgagcctgacctgaatcctgagcaaagccctgccactgcctctgggggggattcctggcaatgcgtcctttgtcctcaagccccctctcctgtcttttcttgcagtctctgtggcctcctatgagctgacacagccatcctcagtgtcagtgtctccgggacagacagccaggatcacctgctcaggagatgtactggcaaaaaaatatgctcggtggttccagcagaagccaggccaggcccctgtgctggtgatttataaagacagtgagcggccctcagggatccctgagcgattctccggctccagctcagggaccacagtcaccttgaccatcagcggggcccaggttgaggatgaggctgactattactgttactctgcggctgacaacaatctcacagtgacacaggcagatggagaaatgagacacaaaccccttgccatctgtgtcaccttcttcctccagccccaggaggactgtggacaaagccacgaacaggtctggcccagtacacccagatcagagactctgaggcctccttccttccagatctctacggaggccctacagaaggtggatcaataataaattcggggttggcaggtccagtaggtcctggtgttttctgggctggagtgtgacttggggaaaaatgacttgaatggaagtacagtcagtgggagacatctattgagtggtgatggtcccagtatttccttgtgtggtgactgaacctagggcagtgccactactctgtggcccaaatgccctgggttattcctctgagttccccgtgtattattgagatgctccagcccccactctcatggtatcctgatctgaagaatcatggccagtgcccattgcagtgtctccatctaggtgccattttcaggactcatgcatccagcatccaaacaaggctgtgtgggagaccgtgacttgtcacagctgttccccactggaaaatgccactgagctgcagagaactgctctcccagtgatgttcccccttcacagtgtggttcaggtgcaatgcctgcctggtccctagattttaatgccatgttttcatttaaaataaccacgaagtgtctcttgctgagcgctccggtgtaacacattcccagtcatgcctctcacaattttctttctgacaaaatttcctgaaaccctattgcaatgaattctccctctcagagtaggattgcagggagttcacaaattaacaaacaaaccaaatactgtctagaagaaagaggatcaaagaggagagagctgcacagggagcgcactctggagtctgcagatattcatgagcaccgatgagcatgtgcatgggaggaaaccttctgtgatagagaaaataaccattcaaagacatttgaggaaacactccatagagctcacacacacatccatgtgcacacacatgcacaatcagaatagtgcctgttcctccgctccatgaagaaaggcccgagttaaagtgggtgagatttaccagtgagaagagctttgcctcagtactggggaaaacattgccctagacaaaaggcatctctggtgttaactaagaaagtgtacggcccctgtgctgatgcccatgtcaaagaccatcacacgtattttaaccaactagcccagagttgtcaccaagagtttgatcttacaataattctgcaatgaacatccctattcagactccttggagttcacctatgaagattaccatagaataaatctctagaagttgaattgttaggtcaaaaagaagtacgtttgtaattttcactgattattctcagattcctattcacgggggggttgtaccaatttacagtgccagccataaatctttgacgtgagtatgctgttgaaagtttgggtttttgccaacatggtagattaaaattttgttgtcttgtaacagtgttattttggatttctcctattctgcttgaggttgaacattttctcaaacatttcagggctcttatattttaggatttagtgagcttttttctaaaatggccaggtaaggagggttttagcccctgtgggccaagagtcaactttgaccatattatgagggaacttataactccagttacaatgtaaccatttaaagctataaaaaccactctcagctctgggaccacacaaaacaggtggcaggccaggggtggccacaggatgtggtttaatggtccctgttttgtagggtcatttgaagtttaaaaatttcaccagcatatattttaggtggagatctttttgtgggtaatactgtatttcaccgcctatagtggcctgagatttctctctagataagaacacacttttcttattttttggatggattttgggtctatctgtgatagccctgtgtcataaactcataacttttgtgtccgtccttttactgtgatttttgggagtgtgacagtatatcaggaatacactatccagggtggaaaatcagagagagggggaggagcaagtgggcaaggaagcttgtaccaaagctggaatatccactgcagcaggctcagagaaaagggtcctaatatcagcatttgactgaagccaaaaccacaagagaccatagaggttctgaggatgacaaataaaaacatagtttaagttttaatgcattcattatttttataatccacaaaaattctaaaactcagaatttaacaatgggataaggaaaagagtttgagatgttaaacgataaagaccccaaggaaagttgccaggaaaagaacaggacctttttggtggaactatgtttatgctgtaaattaccctcttctatatgtctatatatatatttaggtataagagaacatctcatggaacacccttcttcaccacagtcaaagatcaccctcacccaaggagggaaccgaaagggaacgtcaatatgagacagaaaacataatgcacttttgtataaacattaggagagtctctatttgcatatcaaatgtggatgcttaatgttaacattggaaatagtaggttaatatgcatgtgaggtgagttttcttttgactatttctgtctgtgatttatctttcttaatagggacatttctgcccttagaacaacttaacttgtgatattttttgttctattatctgtatcagctctgttttttttttttcaaacagtggcaaagatatcccatgactaatgattaataaattcaattaatgggtatttaaattatttcaagagtggacagttgtgacttccccacatctaactcacagatgtcgctgatgctgactcactcttctcttccaatcatagcaaataaagtgggagctttgacttttctgaagacccagatgacaacaggagagaggaggtgaaaccccctaaagctgttatcctttaaaccctcaggaggaatcatcctggagaaacacccacacttgagttggattatacctaaatgagagtttggtcttagagttggtgctgagttagttcaggatttgggttgttgggatggagtgaatgcgctttacaagtgaaaaatacatgagtttttgggtccataggttggagagttcttggctgaattgtgtcccccagagttcatacaatgaagctctaatgcacggtgtgtgactgaatttggagagaatctttaaagaggtgattcagtgaaaatgaagtcatgagggtgggttcttatcgaatctgactggtgttctcgtgagaagagaaaatttgcacacacaaaaatgagacactcgagatgagcgtgcagaggaaagaccgtgtgaggactcagcaaggaggtagcgacccgcaagccaaggagagaggcctcagtgaaaaccaaacctataaacactttcatcttgactccccagcttcagaactgtgagaaaataagtgtctgctctttaggccagcaggtctttggtatctcattaaggtagcactagcaaatgaaaacaaaagggaccccaaagaccttggatgcgggaggaggaggagatggagcagggtgcaggaggtggggcagggaggggctggaagttcaggctctgaggtcatctcctgggtggaatcctgactccactcactgctgtctggggacttggggaaaaacaattaaccgcccaatattaattccatagtaaagatcgggccttgagcacaggattcctcatcttccttttttatatgatgaaagtcttcttgaggtcatgcttgtaaaacactcagcaatgtatctggcatacactatggtctcagaagtggttattatgaattttctagtgatatgtagaggatgacattggtcctgtgggcagagggggcactgtggaccttggtttgaggactctgaaagacaccaagtccgctggtagtgctcaagagcgaagagcatcacagatgcttcctcccaggccccttctattgggtaaaatttactctccactcctgacacccatctggtccttcttctgaccttagcacattatcagtttgaagacttaaggctcagggctcagatgggagctaggacaggcacactggggaatgaggagtagatttgcattcactgctcatcagagagcccacccaacaaggatacaagaataaaagaagtagatttgcatgaagagcctctccttcccatgataagagaggcctgaaggtccctccccagccatgggctcagagacagagctatgtggcatctccaccgtggcctggacccctcccttgctcaccctcctccgtctctgtgctgcctcccagggctcagcccccaaaggaccagagatcagactggccctgagcttcagctcagcacagggagtgatgcagagtgtggggctctgggaatgaccctcatcctcataattaactctcctgtcctctcttgtaggctctgtggcctcctccatgctgactcaggagccagtagggtctgtggccctgggacagtcagccagggtaacctgccagggagaaaacctaagaagccatggtacaaactggcaccagcagaagccaggctaggctcctgtgcaggtcatacatcgacaaaataaccagccctcagggctcccagaccaattctctggctccaagtcaggaacacagccaccctgaccatcactggggctcaggttgaacatgaagctgactattaccatcactcatgggacagcagtgctactcacctcacaatgacacagacagattgggaagtgagatctaaagaccttcactgtctgtgtcaccctcttcctccagccatagcaggactgtggagacagccatgagcagggctggcctgggtcacctgcatcgaagtcctccaagctgcccttccccccagctctccaggtagtctctgcagagaatgagtcaggataggatttggggctggcagaaccaggctgtcctgctgttatttggaatggatgtaccttggctcaagatgacctgagccatcttactggaaggacttactggaaggacggtaagagggagacagctcctgagtgctcatggtcactgaatttcctcctgtgtgttgactgaacccaatgcagtgcctctactctgtggcccaaataccctggattatttttctgaactgcccgtgtttaactgagaccctcaagccccagctttgtgcatcctgatgttctgaacatggaagcctttcacagtgtgcactgtgacatccctcagattcccgtttcaggacttatgcacccaccatcctcccagggctgcagggaggccctggcttctcacagctctccccaccagaaactgccatgcagtacagagaatagctttgctcaaagaattgcccatttcagagtatgtttcgggggcaatgactccctgatgccttaatctgaaagtcatgctttaatttaagaccctgaatatcaaattgaagtgccttctagctgaacactcaattgtaaaacattcccagtcacacactccacacttctttcctgagaatatatcctgaaaccctattgcatggaatcctccctctcagagtaggattccagggaacttaaaaattaaaaaaaaaaacaacacaccagtctagagggaaaaatattgaagaggagagagttagggagttgcacaaggaaagaactctgaagtctgcaaatatgcatgcactgaagagcacttgtgtgtaaagaaactccctctgaaagagaaagacccttgagggaacactccaaagagtgtgcatgcgtgcgcacacacacacacacacacacacactccagtcacagaggaaaggcctgagttacagagcatgaggtggactcatcagaagagcttcggctcagtattggggaaaatgtcggacagacatagggctactccactgtcaactaagaaagtgtagaagcaaactgggaaaagttaagacagtttccaagtaactttactgaatccaaaaataaaagaccaaaatagagaagaaaatgcaaaaggattataaactcaacaaagaaaaattcacaatgattggcattctgtcaatatttcttgcaagcaaaaaagaaaatatatgctttaacacagagaaaaatgaatcaatccaaagtggccaaaaattgcacacatgatagaccttgtaggcacgaattttggagcaattctttttttttttttttttttttttgatggagtctcactctgttgccaggctggagtacagtggcgcgatctcagctcactgcaacctccgccacccgagttcaagcgattctcctgcctcagcctcctgagtggctggaactacaggcatgtgccaccacacccagctattttttttttttaatttttagtagagacggggtttcaccgtattggccaggatggtctcgatctcttgacctcatgatccacccgccttggcctctcaaagtggtgagattacgggcgtgagccaccgcgccagccttggagcaattcttataactcttttctccttcctcatgagaatggaggatctattgaatgtgttaagtggagaaatggaaagcataaagcaagatgcaagttaaacttttagaaatggcccctaaatatctgcattgaaaaaatacactggatgagactcattgcagattagaagctgtgaaggaatagatgagtgaacttgaagatatggcaatggaagttatgcaagatgaagcacaaaaaaagtgaagagagcatcagtgagtttcaggacatcttcaagctgacttactggttataattaaagacatgaagggagataacattggtggggggagaggaaaggtagaaaagccatttaaaggaatcatggccacaatttcccaaatttggtgaaagctagaaacccactactccaaaaagcttaacaagtcacatacacacacacacacacaaacacacacacacaaataacacaccaccaacactcaccataatgaaattgctaaaaacctattataaagacatacttttaaaagtagccataaagacatggtatgtacagatgaacaacatcataaaaagaacagatttctttttctttttaaaattttcttaaacatctgtgggtacagagtaggtgtatatgtttgtgggatacatgagatattttgatacaggcattgccatgtgaaatagtcacatcatggagagttgggtttccatcccctcaagcatttatcctttgtgttacaaactactcaattacactatttcaggtattttaaattgtacaattaagttgctgacatgttatcaaatagtattgatgtaactctgacatgctatcaaatagtaggtcttattcattctttctattttatttacccattaagcatcccctaataagagcagatttcttcttagaagtcatgcaagcaggaggcagtggagctatatttataaaatattaaaagaaaaaacttactaccaaaacccatccacagactcaatgcaatccctatcaaaatacaaacgacattcacagtagtagaaaaaaactctatagttggtatggaaccacaaaatcccctgaatagccaaagcaataccaagcaaaaagcccaggctgaatatgtcacattatctgaatcaaaatatactacaaactacagtaaccaaaacaagatcgatggtattggcttaaaatcagacactgagactaatataatggaatagaataccccaaaataaattcatatatttacagccaactgatttgcagcaaaaatgccaaaaacatacgttgagaaaatgacatacttttcaataaatggcgctgagaaaaactggatattcataggcagaaccttgaaactagacttttatctctctccctatacaataatcaactcaaaatttattaaaactccgaaatataagacccaaaactataaaactactagaagggaacgtagagaacacaggggaagttcttcaggacgttggtctagacaaaaattccatagctaagacttcaaaagcacagggaacaacacgaactagacatatgggacttcattaaactgaaaatcttctgaaaagcaaaggaaacgatcaacagagtgaagacaacttctagaatgagagaaaatatttgcaaactattcaactcaaaagggcctaagatccagcataagaaaataagacaaggagctgaaataactcatcagcataaaaaacaaataatacaattaaaaagtggataaatgatatgaatagacttttcacagtcaaagacatacaaatggccaacaggtatatgacaaaatgctcaatatcactaatcatcaggggtacgcaaatccaaacctccatgagatatcatctcatcccagttggatggctatcatcaagaagacaaaaaaataacaaacactggtgaggatgtagagaaaatagaagacaaaaccacatggtcatctcaacagtcacatcaaatgttttcatgcgaggaaacattaccatttgttgtttttctagtcttgctagagcatcataaaaagataagatttgtggtgccactattggagaaaatgttattacatgcaaagactctggctatcccacaccaaactacatgaacacttactgttaaatgctaaaagaggccaggcacggtagctcacactcgtaatcccagcactttgggagaccgaggcaggcggatcacaaggtcaagagatccagaccatcctggtgaaaccccatctctacaaaaatacaaaaattacttgtatttttgcacggtggcacacacctgtagtcccagctactcgggaggctgaggcaggagaattgcttgaacccgggaggtggaggttgcagtgagccaagatcacgccactgtactccagcctggcgacagagtgagactcaggcaaaaaaaaaaaaaaaaacctaaaagattacaattctgcatttccaaatgttctggtggtcagagaccacttccttgacaagtggtgagtacggggatctgatgggataggtggcatttaggcaggtattgggtgaagaatagtgatatacacaagaaactttcaaagagaaaaacacacggaagttggaacacagaagagaacataatatgtctgagaaataaggaaagtccagactcactggagctgagtgagaacaagaaaaatggcataagccatgtatttctctctggatatctcatcaaaatattgtctcctccccaacacaccacccatgtgaattataaaaatgcccgtttttaatttttgtttgcatgtcgtgacagagtcaagcacgtgaatcaagctgagtttgatgagtccagggctgttaagctccagacccaggtggcctcagaaggacttggtggaacaagggcttgttgtcaaaagcagaggaagtgagattttccattgtggcttagaccagagattcttaaattccagtggacacacaaggccccttaaggatctggttaagatgcagatgcagcctcagcagttctggatgtggccccaaattctctgtgtccggcaactcccaggtgaggctgctgctgctggtcctcccaggaccacactttgagtggctgaactcttattcacccacctcactcaagccacgggtgagactcacacaaggagggcaccttctagaagcacaggtcacttctcactcctccccttgtgtcttagatcctttcctgttactataaagaagtacccaaggctgggtaatttatacagaaaataaaagttttatttggcagacagttccaatggctgcagagttcaaaatgtggcatctgctcttgttgaagacctcaggctgcttcctgtcatggtgaaaggtgaaggcgagccagtgtgtgctgaggtcaatgaggggaaggaagcaagagagaaagggaagataccagtctcatttaaataagcagctcttctggaaacagaggaaattcactcaccccaagtgagggcattaatctattcatgagagatccactcctatcaccctaaaagctcccattaattcccacccccaacactggggattcaatttcagcataagatttgcaagggatgaagatcaaagccatagcaccctgaggcttggccacacacttgctcatctccacatttgtcccttccttcaggaccgggatcctgactgctctgactcagtctccgtctacctcatggacacctggcagtcggtcatcatcggttttgctgaatcagcagcaacattgggggtaacaattgtgtctcctggttccaccagagacagagtagagacccacacagctgaagtgtggggtcaaatattaaaactaagagacataagattgattctcaggctccaagtctgacaagtgagcttctttgagactccctgggatcccagcagtgacactgatcactgttgctgttccacacatcccaagtgatgaggaagtaagaccaaaaccctcctgagattcctgacttgtgtcctgacaccaggtctgttcttccctcccctagaataaaacatctcttaagcacaaggctgaagaaatgtggcctcctcctttctcccacagctggtcaaagtggatacctgagagaattggctcactgaggcctcttgggaacaaaggctgggttcctgcctgtgatctgtgtactgagacacattccggacctgcccaggaaaggcaagtatagatgatgtttagttgtcacagagtccaagtagggacaattcagcggtgtcttcttgggacccctgcctctggctattttcatctactttataatgggccagggccattatttccaacttgtcatatcctttttctcctttcctcaccaggtaaggaggtggaggacagttgatgagggctggcttatgagttaccccaggatgcaaatgactttgaagtcaagcccatgtggggtcaagctcagtctataaccagggtcttttgagctctggaggagccaggcatcccagccatcaaagaggtcttgcatttgctaataaatcctcttcttccaacccacagcttatcttggctgcctaccctcatctctgtcaggaagcaatccttcgttgtttaacaccaaattattcttacttggtcagtttaaaagtcccttcctcagaaaggtcatctgtggcctgaagacaaagtgagaaggctttgctgcattttcatttggaaccttacattgccccttctgcaatgttctaaccacacatggcacatatttacaggacagcgtgataattcacttttgaaaatacagaatgtgctcatggaacaggacaatgtcatacttttggggcctgatgagcatgtccttttcacaggaccccccagagctgcccatgcatccagaaggtaccattctactctatgcaaaacgatggggcatttctatattgcagtttcttagggttccttagaaagaggccacccccaacacagagctgcacaccttgtgaccacttactgtcaattcctcaatgctgtctccaagtctcaccatgcacaagggaggaacacagagaccctggattcctagagacttgcatttcttggatgaacaaatctggggtttggttggtggcagagagctcagggctcatgtgtgagcatcacctgatgcttcctccagggtcagagtccagcccctaccctggaaggatgaaagatattgtccacagaagtggtataaaggtaacagcatcgaggacggagctgcctcttgaaatgggctattgctttgcacaacgctggagacctaaattatgttgactataatggaagagtagtccctgcggatggcctctaattgggtggaagaaagcagagggtctgcgtctgagagagcagcaatgggcagattcagcacaggcatgggcagagcagcaatcaagggtacctgagcagcaatggccccgggagaggcctggcacctgccggaagtgacgttggagacagagaaacatctaagacttaaggcttctctttctgtgcaatcccccaccccacagtttatgtgtcacagatattggcacctccttactgtaaggggtcatatgaataatacagtcctcaggggcatgggttcgaggggcagccaggtttatcctcgaagcccacttctgttacctgcagctgtgtggctgtaagcaaggcatttaatctctcagaaaaccatcctaatgagaggttaagaacctctgagaaaaaaacttagacaagaattgacagtaattcttcactattgaggctgcagggatgtaacttaatcatgtttgtaaagtgcataacacagaccctgacatgccccagctgctcctgagttggcagcaattattcctgacatcactcatgagaattggacctggaatggggatggagggaaggcagtgcagagggtttcagagggttaggaaaagagagactttaatgatttaaaatgaaggcctaggagtggagacaagcgtcctgggacattctcctgccaactctcacaatgtctcagagactgttccaaggtgaagtctactagagagctaagggaggagtttgcagaatcaaggtttgcaatgtcatgcatgagggggcagagagtcagcgggagggaagacagctgagctcatctgaagggtatttatggttttctggccctagagtccttggccatccctctatgaccagggcctcagataagcagagagcttatctgcttctctcctccaacgatagttcctggttatcctgagcccaggtcagtgcagctgtggcccattctctcctctttgtgctcagtggactgacctggaggaaacagtaggaggttcccctgctctctgtccccagggtcctttcctttcagtggcaccagcccagccctagtgtccatccatctgtgcctgcccagtcaggcctccatgctgccccctgtaatggccacaggtcaaaaactgattgtcagtcttgagcagattgtcctgactctttctgcaaaactgagcctctcacccagcaccaggacgtcacaagcaaggccagctgtaggaaggcaagtaggggagtaacgtgcatcacagagtctggacaagacaaagtagttctgctgggacacatcctggtgatgtttctcaggatggttcaggtccctgcaattgcaggcccagagaacaggactgaaggctggaagatgtgctccctttctcctgtacacaaaacagtgccatgtgtgcatgtgagtaaatgcatatgcctgtgtgcttgtgtgtgtgcacctgtgtaaatgcatatgcctgtatgtgagagagtgtgtgtgtaaatgcatatgatgtgtgtgagtgtgtgcatgtgtgtaaatgcatatgcctgtgtgtgtgcatgtgtgtaaatgcatatgctgtgtatgagtgtgtgtgcatgtgtgtaaacgcatatgcctgtgtgtgtgcatgtgcatgtgtgtaaatgcatacactgtgtgtgagtgtgtgtgcatgtgtgtaaatgcatatgcctgtgtgctggtgtgtgtgcatgtgtgtaaatccatatgcctgtgtgtgagtgtgtgtgcctgtgtgtaaatgcatatactgtgtgttggtgtgtgcatgtgtgtaaatgcatatgcctgtgtgtgtgtgtatgcatgcgtgtaaatgcatatgactgcgtgtgagtgtgtgtgcatgtgtgcaaatacatatgcctgtgtgctggtgagtatgcatgtgtgtaaatgcatatgcctgtgtgtgcatgtgtgtaaatgcatataccttgtgtgtgtgcacatgtgtaaatgcatatgcctgtgtgtgagagagtgtgtgtaaatgtgtgtgctgtgtgagtgtgtgcatgtgtgtaaatgcatatgcctgtgtgctggtgtgtgcacatgtgtgtaaatgcatatgctgtgtgctggtgtgtgtccatgtgtgtaaatgcatatgcctgtgtgtgagtgtgtgcatgtatgtaaatgcatatgctgtgtgtgtgtgtgcatgtgtgtaatgtatatgcctgtgtgtgtgcatgtgtttaaatgcatatgctatgtgtgtgtgcatgtgtgtgtgagtgtgtgtgcacgtgcatgtgtgtgtgcatgtgtgtaaatgcatatgctgtgtgactgtgtgtgcatgtgtgtaatgcatatacctgtgtgtgagtgcatgtgcatgtgtgcacatgtgcatgttagtgttgccagggagtgcttcaagtatcgaatgtcccaaattcacaacttttctattttcctcacttacctcctccctgacacatgcttctcagttaagtgagttcatatgcgcaaggcctacaaacaggcaaggcatgggccatagtcagtgctgagtcagtgtcatcaaatattgttatgcttatatagaaccttgtccagggtgggccaaatgtatgcccctgtcttgtcctgacagagcagcagaaagggagactgagacaaaacaatggccagggccctggcaacacggagacaccttcccactcctgtgagcttcacagacaaccctgggtatgggattcctgtcattcctttaagattgttcaaataaacagtgacaatcactctcatatgatatatgagaagaagaagaattccatataaaccaaacccatgacgcccacactgaagcctgccaagttctctccagtcgagcccaatggagggagcattttcatggggacttttgagagtatggagaagacctgaggaaaccaggctcagctgtgggctccagaggcaaagctctgggatgtctccccatggcctagacccttcgcctgccacctcttctcactctttgcacagatgcttcccccaggctaagcccccacaggaccctaatcctagtcctgaccctgagctcagcccaggtgatgcttcaggagatgggaccctgagaataagccctaaagtctcctcaacctgcaggctctgtagtctcttaaagactcaggtacctccagtagagttggccatgagacatctgtccctccaactgctcaggagcaggcaacagtgcagagagaaacagcagcccaggccaggccctacactcaaagcagcccccaatccccacagatcctccagcgctaacctggggtacaggccccacctctgcaggctgaggtgggctcctcagcatggctaggccatgacgggggatggcagtgtgtccatgggacacagccctgctgcctgcctggccctcatgccccgtccctccccaccctggttaagctctgccccaaagggcccaggttcataactcaggacacctggatcggctcttggacttgcccccactgttctctgttctcctgagccacttagtttcttttggccacagtgttacctgctgcgaagtgaggaggcttatactgaactgaagaagcacttttcttcattcaaaattaaaagatagaaaaacaatggaagtcatgcgaatggggggatgtcatttaatgggcttcagtgggcttcagacatggaatttcttgtctttcctctgcagagattccaagaaaaggactcgaaaagagcttgctttctatatggtgggaacagcagctgccagctaagaataagcaggagagtcccagtttcatcaggaaaacagactaggctagtatggaaatcctccctgcagaaactctgagaagtgtggaatgaaataaacataaacatgaaattaatctgccaacgatggtgatgttagctcacaactaagctgcagtgccagaaacatgcggtgattgcagtgaatcatagctgctcttactgggtgggaggtgcaccagtttgcttcctaagtgcatagaaagcctggcacgcacgtctctctggactttgaaagcttggcagaagagcttcagttgacttactctaattagtcctgacggaacaaaaccactagagtagggcatttcaaccctgagacacttctgtagcaattgctcctgccccacatccctgcactgcatgtgtgacctctctgtggtgggctgggcagggcagattgggccacactggcacagaatggggctggactctctggtcctcaacttctgaggtgacaggtgctgtggggtcacctggaaggaaaaagctcctgggctgagtctcctccaccagttgggggcagcagagctgcagccagcagcagtgaggagagaggctggggctgcccagccggggaaaagaggaaggcctgcctaaggttcaacaggtgtccaagaatcagtcttcagactgaaagtgaagacagttcatcctatcccctcaggctgcagtgaccacgctctgagggtcagactcatatagtgttactccaggacactgacagaagcctggcacagtgaaggcctcacctgggaaatgctgctggaggaggctgggcccaggtgtcagcttgggcagcttcctcaggaaggggattccctggaagaagtcccgaggtcaaggtgctctaggaggggcacagtgtgaggtgacggggttcccagggcctgggttcttcacccaggatggcggcctgagcctcctgccactctcagggccttgtcctgccctgtccagcagtgtcctggggagctgagccctctgtcgtgggcacttccagatacaccctgcctaccctccctctgcctttccttccagctccaggcagactctgactcaagggcagctcctgtgcttaggggagtctcaggtgggtggcgtgaagtatttggggccctggtccctgcatggggcatcaccagcctcattgaggagacactctccagagggatggggattctcacctgcctcaggccacagccctgaccccggacctgtccatgctcagtgacaggacaataaccaggaacctggctggagtaaccagggaccacccatcctctggagctcacatgctgtgcagagaccatgaccctgggaccctgggaccctgggaccctgggaccctggaaccgtgacagaatccatggggcctaaagttagattctcagtccactatggttttctgctgctttttgcaagtttacataaaacattgatgagaaaaacataaataaataacagacgagctgagggtgccaattgcttatctcttgtggcaatgagggaatggtatagaaggagcagcaccatggctgaaatgagaccagaggccctgttgactccacaggggtgtgtggttgcttaaatgacccaactattcccactgaataatcagcaagtgtcccaatgacacagcacagcatttagatgaaatgaacaagaggggactgagtctgagggaccagggggaggaagatcatgggtccctggtccacctgctgctgagtcaggtgtcagcatgatctctcggcagggcccagctcagccccatggccaaactcctggaaggtccacagctctgctgagcctggcccaggacagaccccaggtcaacgaggtttgggacagtggtcatgaagtcaattcccaagaaggtgactgcgatcacagggcttcaaggctgcagctgattttctaaccagagatcctgcttcttcttcttcctcttgtcgcctgtgctgcccccacagctggtttgggtgacatctctccaagaggagtcccagaggaagtaaatttgcataaacaccaaacactgactaccctaaaaagcctgagagagaataagagaggcctggggagcctagctgtgctgtgggtccaggaggcagaactctgggtgtctcaccatggcctggatccctctacttctccccctcttcactctctgcacaggtgctgtccccaggccctgctccaggccctgctccagtcttattccccacagatcccaagttgagcctgccctgaatcccgagcaaagcccagacgcagcctctgggtgcgactcctgggaatgggtcctttgtcttcaagccccctctcttgttcttccttgcaggctctgaggcctcctatgagctgacacagccaccctcggtgtcagtgtccccaggacagacggccaggatcacctgctctggagatgcattgccaaagcaatatgcttattggtaccagcagaagccaggccaggcccctgtgctggtgatatataaagacagtgagaggccctcagggatccctgagcgattctctggctccagctcagggacaacagtcacgttgaccatcagtggagtccaggcagaagatgaggctgactattactgtcaatcagcagacagcagtggtacttatcccacagtgacacaagcagacagggaagtgagacataaacccctccccctctatttcatcctcttcctcctgccccaggaggactgtggacaaagccatgagtaggcttggccaaattcacccaaatctgaacccccaggctgcccttccctccagccctccaggcaggcactgcagagtagtcagtctggagtggatttgtgcctggcaggccaggctgtcctgtgtttctttgcctggggtttgagttgtcgatggagggtctgactggaaagacagacacagggagacatccatgcaggcatgtccaaagggacatggggaactctcaggtctcagttgaatgcagtcattgttgtatcctctgggaaagcattcctctagtgcatctaagacctccagacccacagagcctgagatcaggaggagagaatgttaaatttttgctaatggaccactgaagacatttttgagtggagccactacaatttactccttgattctggactcatggatcctgactgtgggagaaacagcaccatctattgggcactgatgcacagaacatgccctatcctggaagacattgtccagccctacacatacttgccacttgcctggtgcagtaatggtgtctccaagcagtcattaaaccattcatataagccatatgtctcagaatgtttgggacaagagtaagaatcttgattgccagaagaaaaggcccatagccctttatttgcagtgaaatgaattccttggtcagaacctcctgtggaataccatcatgatgggtgcgtcattctgtaatccagagacaacagttttggcagaagcattgctgtcaatgaaagcaaatcctctgtagaataaatgtcaattctagtaagaaaaaagagctattcctgccatgatggaagagtgcaaacgaaattaatattaagcaggcccctggctgttttccacagagaaagtcatcctatagggatctctgtgttagtctctgctgttggcagatggtcactcagcagtggctacagccaggccagctccagttagtggaaatcgacattgatgagcccatggacagcctccatccctgccaccatgggcgcttttttttatggagcccactgggcattgacaagagtggttgagggaggctgcctgatgtccacagaacaagtcaccctactcacctgattagcaaaatcacttcattttcacagaagacttggtgagtattgacatatggaaaaaattctcttactttctgcccaccggaggaggtctattcacacatctctccccctgacgtatttgtgatcaatattctcattgtgtctctctcaagtccctgaacatccttgagcatctttcaagaccctgagtcacaacctgtgaattaggaacctctgcccatctcttggcaggtgacatgagccaattgcactgcttaaaattctactttaatgagaatgttcctccaacactgctgttcagggattctcagaggccaggtggagtactagcactgtccacaccagtagtggctgcatgtcctgcagaaaactctgtaaccccagcctaagtgcctcctcctaggcagctgatctcagggagcccctcaggacgtcaaggctgtagggtgagaggaagacatggtgcagggctccggtcatgtctatttggccaactcttcatgaaacttacttgggcctcgtgacctagtccctcaagtcacaaatacatccctgccatgtgattgaggagctgctggaaatggccaaccgggactgtggttcagaccaaacctagcatactggcaacttgggtcgcatggtgagctgtgtggccacaatcacacagagcctctgctgaggcccaggagcgttcgcagtctttctcaaatggagctttctgctcattcaaaaaaataagtagagggaggctgggaccccaggaccacttagaccacgcacatgatcttgtctgattattctgaatccttgcatgctcagctatgcattatggtaaccaagccacagtgtctttggcaataaaatgccactacttggcccccacctaacctgggatcccctcaaccacatcttgctacccaaaacaggtttcacctccactgagagaaatttatttttatattgagaagatgaaagattaattatttcaattgtgaaaattttataggacagtaatgtgaaaatattttaaaagacactttacgaagagtgaaagaccttccattaaaccactcaatatatgacactgtaattggcctacccaaaccctaagttcagctccgggttgggaccttctgggaatggacccttcatcctcacgccctcctctcctctcctctcctctcctctcctctcctctcctctcctctcctctcctctcctctcctctcctctcctctcctctcctcttctgtcagccctgtgcctcctatgtgcagagacagctggtctcagtgttggtggccctgggactgacaatcatgagcacatactctggagataaccttgagataaacatgcattaaggaaccagcagaatccaggccagtccatggtgctggtcatctagtataacagcaactgaccctcagggacatctgcccaattcttaggcttcaactcagggaacatggccaccatgaccattaatggagcccaagcccgggaagagactgactattgctgaactgcagataataacagtgggagcagctggcagggactcatagtaacacagagagacagggactagccacagaactgtcccatctcggcctggctctcattctcagctgccctgtgagcagctgaaggtcaggcctcagggtcaggcgtcctctctggtcttaacctggcccctgcagggctggtgattctgagcagcttctccatcctctcagggcctgcatgtgtccagtgagaagtgagtggacagggggaagctggttggagctgcaggaacctctgtcaggtttgtggtgtacatgaaaggtttaggaatccacacaacatcacatggccccagatgtaatcacacatcacacaggggaggaaagagctgtcgcagagggtacagtcctgtggaatttctcttttccttgggtataagcagcttagtggaagctccagaggctgtgtctcctctggtttccagatgagttcagttgacctccgcattctaaaggggtgcctgaggcctgaggaggactggagacccagccccttttggccccagggccctttctgtgctgacatttcacagaaactgaagaggaagaacagacactacctttcatcccacctggggactgtctttggggcacgctgaactcccatggcccccaaagtcccatcaccttccccaggtaggtcagacctgactggatgtccctctagtgccctgatagtgtggattttatctttgggctctgggctgctttctgaggagctcactaagaacccttgatgccaagtccaggacctgcccctctgctccatgtcccaggggctgcaagcatgacgggaaggtcctgctgggtgaggatggtgcccttttccagaagagatgtctgattccagtctctagggccaggtttgttgggctttttttctcacttggaaggtctcagtctctttattaccttctttaaaagtacaattggtttaatcgtgaaatcatgtgcatgcactaaagtttacagactatggtcatcagcacatatgtacactctttctggatgggacaactgtggacacggccatactggggtctctgtctctctcattatcacaagggaggataccaacagctctctcctatgcagaccgtagtcatgtttcccaattgcacaagaatgtctcttacagttgtttaatttccttcccagccaggacgcttaagtttcccatgctgatacttggttgctatttctctctgatccaacatttttcaaacagtattgcttgcaacccaaggcttatgaaacactttaccaaaagttccacaagaaaagctcaagtttctcatgcaccgttggaccaggttcattgcgtgcagtaggaccttgctcaagtgatgagtccatttgatgttttcaccatcaaggtgaagggtattatgacttttgggcactgagttgatagaaggaagacagcagctgatgatggccctgcccaccgatgtgtgtgtgtgggcaggacctatcgatggatttagaagttgagggaactgtttattctgcagatggaatttccagcactgaatctccaccaaccagacactagcactcagcaggtgctctgtaagaagaagcccttcactgccaatcacggccattacacaggtgaaggagaggatgatttttaacagccattgaccctcacagtaaactgaggtcaaaactctggtacacaaagtgactttgagagaacaggctgaggaagcaggttaattagtagcagaaggctttgccgagagcaggaacaaaacagggttggtgaggaactagtgatgccatggtgtggaaggaacaaggcctgtaccaggagcaggaaggggcatgggaaagaccacactgccacatgtgatgagtcagcacatggaaggcacagcaaatgttgcacaaaggtttttgtgtaataacctggcaaacagctgcttctctatcaagattgatgagtcaaaaaatgttactgatgcattgctgtcacatgtgaaggtgtgtgaagaatggtgacattcaaggaaacctgttctctgcagacacctacccaccagtacagcagacaccccagctatgccaagggctttgtcttcctctggggtaagagcctgggaacaacaagttggcccctgaaaggggtgccccatcatgcgctcttcatggctgagttaagtggggagctcccagagaactttccagtaaatggtcaatctgtttgttctgggtgcattgagcatgacccaggatcaatggaagtgacagaagcttaatttccccaaggctgcaaggcgggcactgggaggacggctgaagcagtttagccaccaccccctagtggctccagccccaggtaagcagggacagttgaagggcctgcctgagcccacctgtgtctaattagttccagcatcagcagctgcatcctgtagaccaccaaggagtgtgtgtgcccagcccctcacagatcacctgagcataaacaggaaattctccttcttacacctgactgcaccacacatctgccccttgctcttcatttacaagacgctatcacatcagacacggactgatctgagtcccgggttccctcaggtttctgctgtcctctcagatccccacacacaaaagactcttcaccacagggcgttgagccagctcttcccctaacactgcctcttacaggttactcttctccaatatgatgcgggtttgatttcagtgtttctacatatatacttttgtattttattgggtaagctgagccccttgtacctgatcttgagtcaggcaggggccacacagagaagaggtgttcctcccctgggaccagcagtcctcggatcagggcatcagggacctgaacagcaggttctgaatccacacctagacccaggaagtccctgagcccccagcccacagtgtggagcggccaccagggggaagcagagagttacctggcaaagccacctggcgatggggcgggcctgggtgacagggagacgctgacatgcagcaggagccagtgaccatgatctcacacctggaatgaaagggtctttattttcatagagtattgtccttgtgtacttgacactcatgtagaaattctagaataggattttaccttcagctcttgcagatgctgcctctttctctgccacagctccaggcacttgacttctcacagtgccctctcctcacacacccagttgtgctaaaatggtgtccctgccatgtgcagtgtcctccctgaggtcacaggtgtcccctttatctcccctttgctctgggagcccctgtcctgcagacacagtggcttctcctttcctggctgctcctccactttcattgtccctggtctttccggactctctcctggggaagctgccaaatcatggctcttgatttcctggtgagtcacaaaatagttgctcattaacctttagttgacttaagttcttaatcattgatacattttccccaacaactgacgacaacttagttataataaacattcacttctgggggtcttggagtttgcagccccctctcattctctcatggagcaaacatttccttcgcctcctcatctgtctctgatcctgacagcatcctggagatactgaggcacagcagctatgacctacccaggagcttgcagccaaggcagaaacttccatcacctcatggatcttccagcactctgtgtgcacttgacaaataagaaattccattgtcctctaccactcaggagctgtgccctgcggtgggacctgcacctttccaaggtgtgtgttatcatctgcacagtggagatgaagagggaacctgcattgggttctggaaagtaccatctaaaaatatatttagacctgcaacagaaatctcctctctaacataaaatatttatgatcaggacacactgagaggcctagaccaaaattaagcactgccctcctgagccaggatagaatggaggaggggactggggaccccagataattccacagttaccagcatgactctatgatcacctcctggaccagatcaaagatcatcccatatgaaggacttcatattccttaggaaatacaaagtcacctctgagctctgctgtgaccaagtgagcccaggaatgaggctgagcacagtgtgatgtggagatgtctgcagagaatatggaatcaattgataaaggagatcctgtgggcaaagggtgggagggcaaggccacccctaacctctttgggtcccttggggctgagtccttctggaaaccacaaagctcctccagcagcagcccctgactctgctgattggcatcacgggctgttctctccaacaaggggttaagagagacctgggaggagcctgcccagcctcagacttgagaagcagcattggaggcacttcagccatggcctggcccctcttttccttggtctcctgactcactgcccaggtgctgcccccagggtctcacccacctgcccagccccaggcctccaggttcagcctggccatcagtctgagctcagcagggccctgtgtgtggtgggcaggatgctcgtgaccctgctgcagggggaggggctggttgggctgaaatgcccccactctgtgctcctgtgctcatgggtgccctgagagctcttttattcctggggctcactccagccctggcaagtagcaagatatcctggggttgagcctctcagtttcaaattttttatctcccctttccttcttgcaggctctgtcacctcctgtgagctgacacagccaccctcagtgtcagtagctccaggacagatgactaggatcacctgtggggaaaacagtattggaagtaaaagtgcttaatggtaccagcagaagccaggacaggcccctgtgtgggtcatctatggggatagcaggcggccttcagggatctctgagattctctggctcaaactcagggaacaggaccaccctggccatcaacagggcccaggctggggaccaggctattactgtaagatgtgggacattaggactcctcatcccacagtgacagaggtagatggggaagtgagacacaaaccccttccccatacgtgtcactcttgtcctccagcccaggaagactgtggacaaagccatgagcatgggtttcccaattcacctggatctgagaccccccaggctgccctttccacaggccctccaggcaggctctgcagaggggacatcaagactgaatttagggcagaggtgaccaggatatattgaggtttgggggactcagttgtgatttggggaaatggggccagaatggaaggtcaggccaaggtcaacatccttagttggtctctggatttccatagggggtgaaggccagtccttgggctgaatatcctgagtcagtttccagaactgcccagctcaggctcccatggcatcctgccattctctgaaaagggccctggcatgccaggtgctctgggttctgagggagagttggaatcagatcctcctgcaggaatccagggtcaggagaagcagcctcacctgacacagggaccacagatgcacccccacagggtgagctgcaggatggatgctgctcatctccaatcctcacatcctatgcaaaaaatcattcttttcacccctccttcagtgtatcaaagttgacacttaaaaagccttaagagcccactcttgtcaacagaaaacccattcacatctccatcagccacacaatctccacagaatgattcttcaaaaaacgataacagtagacatgaaaaggtatctaaaatgttacataaataattgaacttagattacatatgaaaatgatactatttttggtatgctaggtaaataaaatatattatttggactcctttactttcttctctttgtatttctaatgtggtgactagacattgggattccaatgaggctcacatcatattgtgattgaacagtgctggtctgcacctcttcaggtaacaggggctgtggagtgacctggtgcaggaagccccatctccaatcataggacatcagtgtgaacccagggagaggcactggtgcaagagaaatgagaacaggagtgtggaccatctgcttgtacaggggactgagccctcactttgagccaaataaactttttttctattttcaattctgaagaagaagactttcctggacttctttccgttttcagatttgtgccccttcaggtttggcctgtctggatcccagccaggggacaccgaggaaatccaggagtctcacactgactctgttgtatttcatctgctggggtcatcccaaactgctgcgtatcgtttcctttcctggtgctcaaatagctgctccatgcacttgtcacggtttcatagctcagtctaggtgggaagacaggatagtgtatgttataatatttaaatggaacctgaatccattcattgtttttgtttttttgtgtttttgtttgtttttgttttgtttcgtttttgagagagagagagagtcttgctctgtcgcccaggctggagtgcaatggtatgatctcggctcactgcaacctctacctcccaggttcaagcgattctcctgcctcagcctcctgggcagctgggattacaggcccccgccaccacatccagctagtttttgtattttagtagagatgaagtttcaccattttggtcaggctggtctcaaactcttgacctcaggtgacccacctgtcttagcctcctaaagtgctgggattataaaggtgagccaccacgcccgacccaatagtttttttaaaatatgaaatgttaaaagagttttgtcataggcattgggaaaggtgaaaatagattaaaaacattttaagaaaaaaaccaaaaatgtacttgtagactgtctgtgtgtcttcagtgttgcagggttcagagaggtcagttttatggttcactaaggaggggctaagatggaggaaaccaagaaagccaaaaacacacatctctgccactcaaaacataaatcaaagtaaaatggaaaaaatctttcaataaatcattcccaataaatatcactctggtgcacatagaaaggcctgttagcaaactttccctttcccctgctggctcatatccccatggatcacctgtgtgcagagtggactctgtggtccccatttctcaggctgagaaccagagactgggaaggacaagtcacctgctcatgagtgggaagggcaggattgggagcagctggcttgggttcaggactgtggccctggtcggtgctctgtgtccctccagagggtccctcccacatgtgccccgtgtggatgtgggtgcactgcctggggtggctgatgtgctccagggattcgatggtgcagatgcttcagcacaaaacgtggaggtggggatgggatgaggctgcagctggggagaccagagaccagcgccacccagcagaggtttccacggggtgggcagccccatttcctgacagtagagacaggctggaggtgggtgccaagcagagggcgctgtggggtatgcccaggcctagagagtcacagagacacaggcactacacagcagaggcactgagggccaggagctcactcaggtgagagacttcagcagatccttctctcctgagcaaatcaggtacaaaaaaaattaagttcctgccatcagcatgcacaaacaagaacattcatctcttcagctgagccctgctgtccagggaagcaaaagtctctgagcccaggcccacgtgagggtggggtgaggagaggagcccaggatgctgattttcatggaggccccgccctcctctgaggcaaaggggataagacagggctggggcagggccagtgctggggtcacaagaggcagcgctctcgggacgtctccaccatggcctgggctctgctgctcctcactctcctcactcaggacacaggtgacgcctccagggaaggggtcttggggacctctgggctgatccttggtctcctgctcctcaggctcaccggggcccagcactgactcactggcatgtgtttctccctctttccagggtcctgggcccagtctgccctgactcagcctgcctccgtgtctgggtctcctggacagtcgatcaccatctcctgcactggaaccagcagtgatgttgggagttataaccttgtctcctggtaccaacagcacccaggcaaagcccccaaactcatgatttatgagggcagtaagcggccctcaggggtttctaatcgcttctctggctccaagtctggcaacacggcctccctgacaatctctgggctccaggctgaggacgaggctgattattactgctgctcatatgcaggtagtagcactttccacagtggtccaagttcatggggaactgagaccaaaacctgcccagggccttcagacttcctccttgctctgaagatgcttcctcacccggtgcaagaggcttgctgcagcgcggccttgagaattcttctctctcagctccttccctttccaccatgaattccaacaggaaacctgccctgtggtttcccatccaggacagggacagcttcctgatgcttgtgtgctgtggtccctgaatgtgcaactcttcccagctcttcaaatgcagggacagtgacaaggagctgcctgattggtgcagtcactgcttttttcagggatgtcttcaccctacatgtatcatcatcccctacactgtgggtagaattttagcaactacattctaatggttatcgccacaactttgatcttagaaataacagtgcagtgaacatccctatgcaggctcctttgagttcctgtgtgaatacgaccataggattcatttctaaaagtgaaattgcgggtcagaaagatgtgtgtttgtgattttcacccaatgttgtcagattcccctccagagggattgtaccaattttcaatgccagctggaagtacttgttcagagtacattgttgaatgtggaaatttttgccaacgtatcagagtgaaaaatggtaccttgttacagttttatttttcagtctcccgttctgcttaaggttgggccttttcacaaatagttcagtactcttcatttttcatgatttggtaaactttataaaaaatatccagataagaagaattttagtctttgtggccagacacggtggctcatgcctgtaatcccagcattttggaagactaagacgggtgaatcgcttgatcccaggagtttgggattagcctgggccacacagtgaaccctcatctcaattaaattaaagaaaataaaaataatttttaaaaaaatcctttgtggtccaaggatcaactttggggatattacctatggacttatatcaccatttacaatgcaaacatttaaaatgataacaactactgtcagctgcagaactaatttgactccatcaaaaaaaaaaaagctaaaagattataattctgcatttccacatgttctggtggtcagagaccacttccttgacaagcagtgagtacggggatctgaagggtagttagcatttaggcaggtattgggtgaagaatagggatatacacaagaaactttcaaagagaaaaacacatggaagttggaacacagaagagaacataatatgtctgagaaataaggaaagtccagactcactggagctgagtgagaacaagaaaaatggcataagccatgtatttctctctggatatctcattaaaatattgtctcctccccaacacaccacccatgtgaattataaaaatgcccgttttaaatttttgtttgcatgtcgtgacagagtcaagcacgtgaatcaagctgagtttgatgagtccagggctgttaagccccagacccaggtggcctcagaaggacttggtggaacgagggcttgttgtcaaaagcagaggaagtgagattttccattgtggctgagaccagtttcttaaattccagtggacacacaaggccccttaaggatcggttaagatgcagatgcagcctcagcagttctggatgtggccccaaattctctgtgtctggcaactcccaggtgaggctgctgctgctggtcctcccaggaccacactttgagtggctgaactcttattcacccacctcactcaagccacgggtgagactcacacaaggagagcatattctagaagcacaggtcacttctcactcctccccttgtgtcttagatccttttctgttactataaagaagtacccaaggctgggtaatttatacagaaaataaaagttttatttggcagacagttccaatggctgcagagttcaaaatgtggcatctgctcttgttgaagacctcaggctgcttcctgtcatggtgaaaggtgaaggggagccagtgtgtgcagatgtcaatgggggagaggaagcaagagagaagacaaagatgccaggctctttttaataaccagctctttcggaaacaggggaattcactcaccccaagtgagggcattaatctattcatgagagatccactcccatcaccctaaaagctcccattagttcccacctccaatactggggatccaatttcaacataagatttggaggtgacaaagatcaaagccatagcaccctgaggtttggccacacacttgctcatctccacatttgtccctcccctcaggactagggtcctgactgctctgacttagtctccctccaccttatgggcacctggcagtcggtcatcatcagctttgctgaatcagcagcaacattgagggtaaaaattgtgtctcctggttccaccagaaataaagtagagccccacacagctgaggtgtggggtcaaaaattaaaactaagagacataagactcattctcaggctccaagtctggccagtgagcttctttgagactccctgggatcccagcagtgacactgatcactattgctgtcccacacatcccaagtgatgaggaagtaagaccaaaaccctcctgagattcctggcttgtgtcctgacactggggctgttgggattcctgtctttccttcaagattgttcaaataagcaccgacaatcacttccatgtgagatatgaggagagaataattccacatgaaccaaatccacgaagcctacactgaagcctgccaagttctctgcagtccagcacgatgaagggagcattttcatgggaacttttgggaatatgaggggagccaggctcagctatgggttccagagacaaagctcctggatgtttccccctggccttggtccatcacctgctacctctcctcactctttccacagatgctgccccaggttaagcccccacaggactctaagcctattcctgaccctgagctcagcccaagtgatgcttcaggagatgggatcctgagaatgagcgccaacgtctctttaacctgaggtgtgaggtcatgagacacctgttggccataagacacctgtcccccacctgctcaggagacagtggagcaggcaacagtgcagagagaaccagcaggagccaggccaggccctgcatccaaagcaggccccaatcccacagattctccagctccagcctggggtacagccccaactttctgtaggctgaaatgggcttctcaggatgggcaggccatgatgggggatggcagtgtgtccacaggacacagccctgctgcctgcctggccctcatgcccactccttccccaccctggttaatctccacccaaaagggcccaggctcagaactcaggacacctggatcagctcctggacttgcccccactgctttctgttcccctgagccacttagtctcttttggcctcagtgttacctgctgtgaagtgaggaggcttatactgaactgaggaagctcttttcttcattcaaaattaaaagacagaaacaataaagtcatgtgaattaaagccttctaaggggatgtcatttaatgggctccaatgggcttcagacatggaacttcttgtctttcctctgcagagattccaagaaagggactcaaaagggcttgctttctgtatgatgggaacagtgatctccagctgagtataagcaggagagtcctagtttcatcagcaagacagacaaggctagggtagaaatcctcctggcacaagctctgagaggtgtggaatgaaataaagataaacatgaaattaatgtgcctatgatggtgatgttagctcacaactaagctgcagaaccagaaacctggtgattgcagtgaatcatagctgctcttactgggtgggaggtgcaccagtttgcttcctaagtgcatagaaagcctgggtccctgtaggatggcatgcacatctctctggactttgaaagtgttgcagaagagcttcagttgactcactctaattagacctgactgaacaaaaccattagaggagggcatttcaaccctgagacacttctatagcaattgcacctgccccaccccactgaactgcgtgtgttacctctctgtgctgggctgggcagggcagattgggtcacactggcacagaatggggctggactctctggtcctcaacttctgaggtgacaggtgctgtggggtcacctggaagaagaaagctcctgggctgagtctcctccaccagttgggggcagcagagctgcagccaggagcagtgaggagagaggctggggctgcccagctggggcgaagaggaaggccagcctggggttcaacaggtgtccaagagtcagtcttcagactgaaaatgaagacagttcatcctatcccctcgggctgcagtgaccacgttctgagggtcagattcatacagtgtcacccaaggacaccgacagaagcccggcacagtgaaggcctcacctgggaaatgcaactagaagaggctgggcccaggtgtcagcttgggcagcttccttaggaaggggattccctgggagaagtcctgaggccgaggtgctctaggaggggcacaatgtgaggtgacagggctcccagggcccaggttcttcacccaggatggcggcctgagcctcctgccactctcagggccttgtccctccctgtccagcagtgtcctggggagctgagccctctatcgtgggcacttccagatacacccgacccctcctgcctctgcctttccttccagctccaggtggactctgactcaggacgcagctcctgtgctcaggggagattcaggtgggtggcgtgaagcattttggggccctggtccctgcatgaggcatcaccagcctccttcaggagatgctgtccagaggaacagggcttctcacctgcctcaggccacagctctcaccacggggctgtcctttgatcagtggcaggatctgcatggctggagggactactgaccacatgctctctggagctcatgtcttgtgtggagaccatgacctggggaccctcagaaagaccaagcagcctaaagttagattttcagtccagtgtgattctctggttcttttcgcaagtttacgtaaaacgttgatgagaaaaagtgaataaataaaggaagagttgaggatggcaattgctggtctactgtggggctgggggataccatggaaagagcagcaccacatgtcaaatgagactagagattgggatgcatccgaaatatgtgtggttgctcaaatgacaaaactcttccaactgcaatgattcataagtgtcctacagacacagtacatcatgtacataacattaccaggatggggccaagtgactcgggggtatcaggagcagggatgaaagaggagaaagatgatgcatctttggtgtacttgctgctgagtcaggcgtcatcagtgatttctcaacagggcccagctcagccccaggccaggctcctggaaggtccatagtcctgctcaatgcagcccaggacaggccacatgacacagaggtttgagacagggaccatgttgtcaatccccaggacggtgactgtgatcacaggccttggaggccaaggctgattttctgactggagaagcagacgaaggaagctggggattcaccccttcattttaagtttctcatgctgcccccagagctggcttgagggatatcccgccatgaggagtcccagagaagtaaatttgcataaacaccaaggatgcactgccccagtgggcctgagaggaaataagagaggcctgggaagcccagctgtgctgtgggctcaggaggcagagctgtgggtgtctcaccatggcatgggccacactcctgctcccactcctcaacctctacacaggtgctgcccccagaccctgccccaggctcagccctcctaagcccctggtcttaccctgaaccctgagctcagcccaggcatagcctcagggcgatactactggaatgggtttgttatcttcaagccccctctcttgtcctctcttgcaggctctgttgcctcctatgagctgacacagctaccctcggtgtcagtgtccccaggacagacagccaggatcacctgctctggagatgtactgggggaaaattatgctgactggtaccagcagaagccaggccaggcccctgagttggtgatatacgaagatagtgagcggtaccctggaatccctgaacgattctctgggtccacctcagggaacacgaccaccctgaccatcagcagggtcctgaccgaagacgaggctgactattactgtttgtctggggatgaggacaatccctcagtgacacaggcagatggggaagtgagacacaaactcctttttcatctgtgttgtgttcttcctccagcaccaggaagactgtggaccaagcaatgagcaggtctggccaagttctactggatctgagacctccaggccatccttttttccagctgtccaggttggctctgcagagggtggagcaggagtggatttaaggctgctataatcagaatttatggtgttttggggcctcatgagtgacttggggaaataagaactggatggaagatgaaagagatgtagagaaccatcacttgaccttagatttccatacgatggtgattgggtcactccttcttcaaaatatcctacatcagtcccgaaaaatacccacctcagctcaacacctgagcttccaggcttccatggcagcctgggattttgaacaggaaaagccaaggaggggacactgtggcatctgcctcaatacccttttctgagctcacccaacctcaactgctgggagcttctaggagctcagagctgtgccctcactgggaagtgctattagctccaaagaaaacttccttcctcatatttaggcccagttttgagagttttggtttgatgactgcctgagccaagaacccaaggccctgtcctaatagaggatgacactgaaaggccttccagatccagacatcccagtatggatgcctgaggcctcagttgcaaccctattgtgggtcagggtctccttctggtgggcgatgcctccctcactccttccagatcctctgtgcatgcacatctttttctcagagtctacttccaggaaacccaaactaagatggctggctatcaccaaaataaactaccatagacctgaggtggaaacaccagcgaatttcccaaatttccattgtgaacatccaaatgcccatttatatctgagtgttccttgtattcttataaaatgaaaatggagcctgacataccaggtttttggagtcctgaaggagatgtggagacagatccttctgcaaggaatccaccgaaaggggagcagcctcaccccatgcaggggctggagatgctcccacaggggcagctgtagcatggacgctaccaacctccaccctgcacatcctgcacaaacaatcactctttcacccctccttcagcttatcaaagttgacacttacgaagccagcacagctcacccttgtcaatcagactccttcaaacctccatcaaccacacaatctcaacataaagaatctccccaacataataataggaacagtagctatgaaaatggctataaaatatctcataaataattttagattgtgttcatgtgtaaatattatttttcacactttgggttaaataaaatatattactgaaactagtttacctttttattttttatgtctagtatggtgactagacagtaggattcacatgagactcacatcatgtgattgtacaatgctggtcttgtcttaccccttgaggtggcaggtgctttggagtaacctgcttcagcaagccccatctccacccgtaggacatatgtgtgaagccatggagaggcactggtggaagagaaatgagaacacagatgtggaccagctgtttatgcaggtgactgagtcctggagccctgatcctgttctaacctagatgtgtcacatccatctcaccagagaccgctgctggcctgccttagctcataactggggggatctggcagttcatgaaacatggtcgcttgatgtccagtgttatcctgtctctctcagggcccaataagacaaaaggagctgcttttagaaagggaagtaacactctactgcacatgacatggccttattccaaaaccccatgagtctacgttgggattctccagtggggtttgccatgtacaggaggtttcagttcccacagtagagtcagctggattctctggacccaacagcaggacactcacaaccctgcctgcacctgctgcagagcctcaatgctctgggcctggaaaacaatgggtgatatttgtggctcctgatatatgggttggagccacatccccaagtgtaaaatatgctactcctagacctttatagaccttgtgtctgtttcttcctggagggaattgaagggtataataacatgttctttaatttgtaggagactctcagctgctccagacaactgaagtcccaatttctgctaatacagaagagggaacagtttatttcccactcttaaaagtgcatggatctcacaaaagcttccagtaggccatgcccatcatgtatatgtgattcaactatgatatcaagatggtctgaaccctcatgatgatatcatgatagagataagagagctaatgatgctgggcagagaaagtgtgaatgtatactgtcgtccattccacctgaatgcacactgattctgatcctattctctgagggaaatagacaagacctcagtatctgcttcagtgaggtaactgtgcacctgcagccatagcattctgttcccagagatccccatctggcacagatattgctaatgccactattgcccatctgggtctgtacaaatccaaattcatcttccaggatcattcaactattgtagagatcagtccagtaaactgaaaacaaaaccccagaagtaatcacacgtactgcgggagaggagagagctgtctcagagggcacagtcttgttgaaattcctctgctccttgggaagaaacagcccagaaaaggccccaggggctgcgtctcatctgggttcctggatgaggcacaccccctactgcactgagattccacagaagctgggggtgaagtgcaaataccgtctttggttcatccttgggattttctttttatcacacactcgtcattttgtccacaatgtccaaagtttctaaagtgctgtctaatagatagaggttctttgtgcgctgaactaaaagctcttgggttggacaatggtgatgtttgcacaacatttttactgtacttactgccgcttaattacacacttaaaaatgattaaaaggatgaaacattttgttatgtttattttaccataataaaaatattgcatgctcaggaagcaaagtaattttgcaattatacaactgttaaaaatggaagaattatgtactgagcaccattttctctgttgtttatgctacaattcaactttctctctctctcactctttctctaattagcaatgatcttctgtctggtccaaggtcacacatttccagtcttccagaaatgtctgttgaatctgttaatttgttgccaggaagaatactcaaacttctcatgctcatatttgagtgttagctgtctccagccagcatttctaagccagaccctttgtcaaggcttttgaataattttgtgaaaagtacccccaaagatgacagtgttcactgttggcagcaggactgtttccatgcagtagggctatgctgggtgtgcagtggagctgtgcacactgtgctcacggggcagattctgtgctgctgactctgatccctgtgcttgggaggaccgtgtccactgctgagtctacatctgaatttgattctcaagaaaaaggtcattcatagctattggacactgagtcacatagagggacagaaggtggctgaggacaccttatctctgatgagcataaggggattagatctgctggtggaacaggaagctgaagaaacctgtggctctaaacatggaatttccagccctgagtctctgctgtccgtgcccctctcatctgtatgttcctgggagatgtggaccacgggggttagaggtgaaggggattgggaagctttcatgttctctctcaccatctcccttgcttatctaacacactcttacacacctactttattggagcttctgctctacaaacatggctgagctctaaattagagacttttgaaagtgcagacggatgcaggaactcgtccatctggagactttccaccacttgaagcagtgaacacgtctgtgcaaggctcagaatttcaagtgacaggatgttgggatttcaaagaaaactaaatctttggatgaaccacgacagaagagggaaggttcacacatttccctgctgcttgggcctcagtgaggactgactcagccagtctcaggctcctggagaccgcctgggagatctgcactaggaaaccattttcagcacagcctggggctggtaaggggcccttactctgttattctgctgcctgataattttgcatccagagaagaattaggacctgtgagtccaggaatttcaaagcccatagacaaggtcccctcattctgccgtgacagcctcagctctgctttcccaaaaaaagagcatcttcccagcatgaagaaccaggagcaaagagggagcttctcccaggggtgagcagggcagaagccaccttggtcagtgggaaggaaacatgctcagctcacatctgacccagaatgactcagtcacacctgtgcagggtcacctgtgtgtgagcatcatctatttgctccatgagaaaataccttgtgtggctcttgggtaaaatcataccataggtgacatttctctgcctattgcttcagccgatgcttttcgtgattccctttaggacactggcataaggtaagcatgtcaggtgtgggacgtattgaacaggaaaagcagaggcttctcatatcaatgctcgtggcttgtatttgggcccatacctcatggaaatgggaaaaacagaaaagaaaatgatactctgctcaaaaaagcactgagaaatgctatagtattaatatatcgacaactcatttattgagctaatgaaatattaacatagatagatcatttttatagggggatccctaatccttaaacattatattaaaaatttgtcagcttaaaggatcattaaaaggcctatgtttgattgaaacctggagtactgtactttgagtcttctaatcagccaatgagtgcagggagctggctgccctcccaggtcctgactggctccatgtccaggtagagcagcgctccccacaggcagctggaggaactgacgaggggaagctgttggcatcagggcctcaaaaatttgactcaggattttcccacgtcccctccccaagtccaggcgggttccaggacactcagaagagctcatcattatgggtctaggacttccctggtcctgctcttctttcttccttccccagtggccttaagattgtcactccctgtcacaggcccttcctttccttgtcaagtgcactccctgaattctctgctcctgggtcaggaaagctctggaacttcagggaaagcagtgctgggtgacccaatggggacccagaaagctggcccagggccagatacacaggcagcagggtgggtccctacagtgctgcctggtgggcatcaggtagaggggagtgaccaggaccaactcccctgagtgtcttcagggccaggtgaactagggagggtctgggacctggtgtggacccatgcactgacccaggaataggacaggaaactcctcagagcaaggactgtgttttcctcatgctgagctcctgaaaagcagtcttgccaggatagagtgggccagggtggatatatgttgggtgaatgagcttctgtctctgttttattgcaggagtcactacgaaggtacgctggccctgtatttgtatccagaaccagtcaaagccacctgtgagtcctgcatccctcagtaccaagccccagtcccccttcaggaccacccaccacacagagagacagacgtgcagggagcctgaggaagaacctgaaacctcctctactacatggagtgtttgtatttccatcaggaatcttgagcaccttgtgccgggtcttgaggcaggaaggggccacacagagaagaggagtttcttccctgaggtcagcagtccatgaacgaagggatcagggacttgagcagcagattctgaagcaacacctggacccaggaggcccctgagcctccagcagcccgcgtagagtggccaccagggggcagcagagagtaacctggcagaagcacctggagatggggtgggcctgggcatcagggagatgcccacatgcagggagggtcggtgaccatgacctgagatctggagggaaagaggttcttcttttcttagagtatttgtccttgacaccgatgtttacattcttctggcttcctggttctcagatctgactcttggagatgatccttatttttctgacacacattcaggcactttgcctcttcccatcgacctggcccccatctcactgtcacacatgccatcccatcctgtagtcagacgtgtcccacctccctgcctttgctctgggagcccctgtcctgcagacacagccacttctccttccctggccacccctcaacgtccactgtccccggtctttcctgactctgttctggggaacctgccaattcgtagttcttgatttccttatgagacacacaatacttactcattaatcttttgttgacttaagtttttatccattgttacattttcccagcaacagaagacaacttagttataataaacacttacttcctgggtcttggagtttgcagccccctctcattttctcatgaagcaaacatttccttcacctcctgatctgtccctggtcctgacagcaccctggtgatactgaggcacagcacccatgacctgacactagaactcgcagccaaggtagaaacttaccgcatcccatggatcttccaaaattctatgtgcccttggcaaccaagaattgcattctcctctagcacagaggagctgtgccctggaatggggcctgtacctgtccaaggcttgtgccgtcccctgtgggagatgagaagcgtccctgcattgggctcttggggacccgtcttggacatgagtgagaatgaagagggtccctgcattgggctctggcatgtgactttaaatggatttaggcctgtaccagacatctcatgtctgacataaaatatttacaatcaggacattactagagaagcagaaaaaagctaaccacctccctcctgagccaggatggaatgaaggaggggactgtggaccccagataattcccctgtcaccactgtgactctaacaacctcttaaatcacggccaacatctatcccataggaaggtctttatatcccctagaaaatacagaggaagtcagctctgagcttttccacgaccaacccagccaaggagcaaggctgggcacaacctgggtaaagatgtgagcccagaccatgggaccagtgggtgaaggaaaatcgcatgggctgagggggtgggtaagcaggggccagccctcctctctctgtttcctttggggctgagtccttctctggaaaccacagatctcctccagcagcagcctctgactctgctgatttgcatcatgggccgctctctccagcaaggggataagagaggcctgggaggaacctgctcagtctgggcctaaggaagcagcactggtggtgcctcagccatggcctggaccgttctcctcctcggcctcctctctcactgcacaggtgatccccccagggtctcaccaacctgcccagcccaagggttctgggtccagcgtgtccttgattctgagctcaggagggcccttcctgtggtgggcaggatgctcatgaccctgctgcagggtgggaggctggtggggctgaactccccccaaactgtgctcaaaggcttgtgagagcctgagggactgcacctgccaggagagagtagtgagttttcagttcaaagtctccatacaacaggaaagtcatgggccactggggctggggctgattgcaggggataccctgagggttcacagactctctggagcttgtctgggacagcagggcaagggatttcataagaagcatctttcacctgcaagccaacctctctcttatttatttatttatttatttatttatttatttatttatttttatctttgcaggctctgtgacctcctatgtgctgactcagccaccctcggtgtcagtggccccaggacagacggccaggattacctgtgggggaaacaacattggaagtaaaagtgtgcactggtaccagcagaagccaggccaggcccctgtgctggtcgtctatgatgatagcgaccggccctcagggatccctgagcgattctctggctccaactctgggaacacggccaccctgaccatcagcagggtcgaagccggggatgaggccgactattactgtcaggtgtgggatagtagtagtgatcatcccacggtgacacaggcagatgaggaagtgagacaaaaacaccctcccagcctcggtcaccctcttgctccagccccgggaagcctgttgataaagccatgagtgaatctggcccagttcacctggatctgagcctttcaggttgcccttccctccagccccctccaggagtctctacagaagatacatcaggcataaatatggcctggaagggccagaatcatctggtgacttggggctgttgtgtgagttagagaatgaaggcttgggtggaaagacagacagaggcaacctctgtccactgtcctacccctggatggtcatatggtggggacagggcaagtccttagaccaactgtctggatcaggccccagaactactgcccagttctgctgaggtcctggcccccaggctgtgtggcagcctgtgattcccaacagagcaaaccagaggaatggacactgtgaagtctgcccagatcccctcctcaatgtgacccacctggcactgctgagaagcccagcagctcagagctgtgccctcactgggaagtgctgttggttgcagaaagcttcctcaagtttgtgtcccttttcagaggggttcggtttaatcaaccaagatctcaaatccttgcctcaatttaagatgccactgaatgaagggcctcccagctccagagctccctgtgtggatacctgaggcctcaatgtcaactccatcacgagtcagggtctccttctgccccgtgttgcctcccccactcccttctgaatcttctgtgcatggacatctctattgcagagttagcttccagagaaccccatctaagatggccagctgtccccaacatgggtcatcagggacctgagtaggccactataaactgaaaactctggtttctgtccaaatttgcagagtaaatgttgaaatgcccaatctgatggttccttgaatttttatggaatgaaaagggagcctgacatgccaggtgctctgggttgagggattgttggagtcagatctccctgcaggaaagcccggggcagggggagcagcctcacccctcacaggaaccacagatacacccacaaggtgagctgcaggatggatgctgcccacctccaccctccacatcctctgtaaatgttgctcctttctacaactccaaccagatatgtagatgtggcgaactacgtaaaatacggatcattcatcacatcaaaacccactgcaggacaccctggtcaacaaagaacccaatcacatccccatcaactacatagtttccaaattttccatctccagaaaaataacaataacaatatacatgaaaatcgatgtaatttatctcatacataatttcatgttgataacgtgaaaatgatagtattttgctctactgaaataaataaaatatatatatatatctgaatttatttgtcttatcttttcatatttaatgtggtgactagacactagggggtcacaggaggatcgtgtcataccactatgggacagagctcctcacaactctttcaggtgacaggtactgttgagtaacctgctgcaagcatccccatctccaccagaccatataagtgtgaacccaggaagaggcactggaacaatagagagaaaaacctgcttgtgcagaagacggtgcccttgagccctgctcctgctccatcctacgggtgccacattcatctcatggtgtaatatttcgtgccctgcctgagcttatgaccgaggggatatggcaggtctgactgtgtggttactggtgtctcatgaggttctggatgtaacaaagccctcgaatatagaagaggttgttttcaaaaggaaataattatctactgcacatgacatagacttgttgctaaatcccatgcgtctacactaggattctcctctgaagccttgccttaagcacaaggtttcagttcctatgtccagttcctctattatggtagagtctgctagtttctctggcccaatagcaggacactcactcccccacctgcacctgctgcagagcctttctactcttggccccaaaacactgggtgacacagttctcagacccatgatttatagtgtcagtattcaggcctcaggggtccctgatggcttctctggctccaagtctggaaacacagcctccatgaccatctctgggttccaggctgaggatgaggctgattattactgcaactcacataggagaggtggcactttccaccgtggtccaagttcatggggaattgagacccaaacctgccctgggctctcagcctctctcttgttctgaagatgcttcctcaccctgtgcaaggggcttcttgcagcactgccttgagaatttcccctctcccagctcctctcctttctcaccaggaagtccaaaaggaaacctgctctgtgatttctcatccaggacagtgacagcttcctgatgcttgtgtgctgtggtccctgaatgtgcaactcttcctagctcttcaaatgcaggcacatagtgagaaaagctgcctgactggtgcattcactgctgtttttaaggatgtcctcacccaaaatgcatcctcctcccaaattgtgaagaacaatctggacagaggtcattacagggagtttcaagaaactgcatcttattcaattgtgtccaccatggtctggtaaagatggccctcctggatggactattcctctgcatgtctgtcctgaagcagtgaccactgtgagaagatctgaacatgtttgtgaggtattaaggacgagaggaaactgttgtttttattattcttttgtttttgtttttgaaacaaacttttgctttgtcgccaggctggagtgcagtggcagaatcttggcttactgaaatctcagcctcccaggctctaccaatgctccctgcctcagcctcccgaagagctgggataacaggtgaccaccaccatgcctggctgatttttgtatatttagtagagacgggatttcaccatgttggccaggctggtcttgaactcctgatctcaggtgatgcacccacctcggcctctcaaagggatgggaatacacacaggagccactgcatctggcagtgttttttttatttttgctcctcctctttgcctcaatacctcaggttgctgagctggggagattttgcgtgacaggctcagtgctccctcaaaatcctcccgtctcaattcgctggggccctgtcctggaaactccccaaaagtggatggtgtccctataggttgggagtttccaaaatggccccacagggaagagttaacgtgagtccattccttcttcctcattgacatccagcatttgtaatttccatgggtgtcaatacttttgtagctgaaatctttcttaatctactaaaggtgagaatgaatttaataaatattcagacattagttgcatccaatatttaaattttatgagtcaattggtagacatagccattattatatataatttaggcttcataaactttgattaaataggttttattaaaaacaaagtaaccattttattatgtgtttagactatatcaacatgttgtgtacctgaaatatccacaagaaaatatatttcaaaaaccaaattgtatttattgtctattgttgcataaaaattgctccctaatatttagcatggtaagagaacacgtgtttgtgatcttgtcacttcggtgcatctggaattgagagcagcttagttttgtggttctggttctgggttggtcatgaagttgcagccaagctgtcaggccaggctgcattcagaggccagagcaggtggccaggcccagcctgaggggcttccactgtccctaacctgtttgtctgatgtggaaaatctcagaggaaaaggagagagtgaagtgtaaggcacctgtcccagtcccccttgtcaaaggccatcccatacctgcaccatttcttattctttcctggggcgtcataggcatagagcactgcccattcattctaacgctgtagagtattctgtagtaggattttagccatgcagcctctaatggttatcaccatgattttgatcttacaaatcacactgcagcaagcatccctgtgcagactcctttgagttcatgtgtgcatatcaccataggataaatttccagaagtggaattgctgggtcaaaaggatgtgcatttttaacttttatccattgttttcatattcccctccagttctaccagtttacaataccagccctaaatattgattggaattcattggtgaaagtgcaagtttgtgccaacctatcagatatacaaagttatcttgttacacatttatttttgatttctcctattttgcttgaggttgagcatttactcaaatatttcagtgctcattatgttttaggatttggtaaaccgtttcttcaatgcctcggtaagaggtattttagtctttgccatgcacaagacaacgttgggataatatgtatgttctgatacaccatctacaacgtaatcattaaaacatataaaaaccactatcagttctggggccattaaaaaaattggtggcaggccagggatgtcccacaggatgtggtttaacggtctctggtttctagggttatttgaagtttgaacattgcacccgcatatgttctatgtggagatctctttgtgagggacactgtaattcacctcctctaggggcctgaggtctttctttggataagaacctacctgtaccatgtgtttgattggatcttgtgtctgctcaagacagccctgtgtcacaagctcatgactttcatcttcatccatttgctctgttttgtgagagcttcagtatatcaggaatagagattcctccgaggtgaaaaattagaggcagagggaggggcaaatgggcaaggaagcttgcaccaagtcgggagtgatccagtgtaggctgagagaaaaaaggtcttaaaatcagccttgtagctgaaaccaaaaacacacaagatggttggtgttctgagcatcattaacaaatgataaatgaagttgaacttttaaatgtattgcaaatttttataaagcaagtagatcgttaaactcagaatgcaacaatggaataaagaagagagtttgagatgtttttaaaatttatttatttatttatttatttttgagatggagtctcactctgttgccaggctggagtgcagtggcacaatcgcggctcactgcaacatccacctcccgggttcaagaaattctcctgcctcagcctcccaagtagctgggattacaagctctcgccatcatgccaggctaatttttgtattttttgtagagacatggtttcacaatgttgaccaggatggtgtcaatctcctgacctcatgatccacccgtctcggcctcccaaagtgctgggattacaggcatgaactaccgtgcctggctgagtttgagattttaactgtaagtcctccaactaagttgccatgacaagaacagggatgatgagagtggaaatatgttatcctgcaaattatcgttttatgtaaaagaatattttccctcttttaggtaaaggaagcatcttctggagcaccttctctctgactatcaaagcaccattaagccacaaataaactgtaacatgaagtaggaaacaactgcccttttatataaccattgagaggtggctttatatgcataccaaaatgttgatgctcaatgctaaaattggatttagtaatttaatatgcctacaagaaattaattttctttggattatattatttctgtgtacgatttatcttagttaacttggaaatattctgctctaaaaacaactcttgttttttgggttatattttctgtatcaactatagctcttttccaaatgctgtcagagatagcccatggctactgatcacaaaattcaattttatggcatttaaattattctatactctaaattattttaaaagtgcacagatgtgaatttttcacatctgactcaaaaatgttgctgatgttgactcacttttttatttcaatcttattgaagtaggagtttacttttctggaacctggatgataacaggagactggagaggaaaccccccaaattgttttcctttaaaccctcaggatgaatcatcctggataatcacccacacttgatttgggtgatatctaaatgagagttgggtcttagagtaggtgctgagttagtttaggacttgcgctgttggaatgagttgaatgtttttacaagtgagaaagacatgagttttttggagtccagagggtggggggttattggctgaattaagtcccccaaaatgtatgcattgaagctgtaacacacaatatgtgactgaaattgtgcatagggtctttaaagaggtgactaagtgaaaatgaaaaaattagggtggattcttctcaaattggactgatgtcctcctaggaagaagaaatttgcacacacagaaatgaggcaccagaggtgagcgtgcagagaaaagaccaggtgaggattcagcaaggaggtagcaacctgcaagccaaggagagagtcctcaggggaaaccaaacccactaccacctttatcttgggttttccagcttcagaactgtgagaaaatatgtttctgccatttcggtcactaattctttcctatcttcttgtgggagctctagcaaaaacaagagggaccccaaagaccttggatgagggagaaggaggagatggagcagggtgcaggaggcggtgcaggaaggggctggaaggtcgggctctgaggtgcatctcctgggtggaatcttgactccactccctattgtctggaggacttgggaaaaacatttaacctcctaatattcactcactaataaagatgggcttgaagcacaaggctccccatcatcctattctatattacaaaagtcttcttgaggtaacacttgtaaaactctcgctaatgcatctggcatgtattatggactcataagtagcccttctgagtgatctagtgatgtgcagaaaatggcattcatgctgtgtgcaccagggggcactgtgaggtttagtctgaggcccctaatgagtccaagcccctagtaatgctcaagggcgaagagcctgactgttgcttcctatgaggccccttctagtgggtaaatctgaaaatgcacttggcccttcttctgatcttgagaaattactcagagaaggccatcaggctcagggctcagacaagaaccaggacaaatgttttagggaatggagaacagatttgcatccactgctcaccagagccacctaacgacgacacaagaataaaggaagtagatttgcatgaagagacttcccttcctatgataagagaggcctggaggttcctccttagctgtgggctcagaagcagagttctggggtgtctccaccatggcctggacccctctctggctcactctcctcactctttgcataggtgctgcctcccagggctcaaccccatattatcatgctagctgtgccaacctggccctgagcttcggctcaacacagggagtagtgtagggtgtgggactctaggcgtgaaacccttatcctcacctcttctgtcctcttttgcaggttctgtggtttcttctgagctgactcaggaccctgctgtgtctgtggccttgggacagacagtcaggatcacatgccaaggagacagcctcagaagctattatgcaagctggtaccagcagaagccaggacaggcccctgtacttgtcatctatggtaaaaacaaccggccctcagggatcccagaccgattctctggctccagctcaggaaacacagcttccttgaccatcactggggctcaggcggaagatgaggctgactattactgtaactcccgggacagcagtggtaaccatctcacattgacacagacagatggggaagtgagacagaaaccccttcactatctgtgtcatcctctctctccagccccagcaggactgtgaacaaagccataaacagggctggcccagttcacctgcatctgagacctccaggctgcctttccctccattcctccaggtaggctctgcagaaggtgggtcaggatgatgtgaggcttgaaggaccaggctgttctgctgttgtttagactgagtgtgccttgcctcaagatgacctgaatggaaggaccacaagaaggagatgggcagctgttgagtggtcatgatccctggagttcctcttgtgtggtgactggatctaacacaatgcctgtactttgtggcccaaatgccctggattattggtctgaactccccatgtttaactgagaccctcaagccccagctccatgcatcctgatgttctgaacaggaaagtcttttctagtgagcactgtggcatcccttggcatcccagcttcacacagcaattccccaccaaaaaatgcctttgagtgcaaagaacggcttcatgcaaagatgtgcctccttcagaatgtagttcaggagcaataactacctgatgccttaatcccaaagccatattttaatttagaatgaccttgaaatgccttctagctgagcagtcagttgtaacacattcccagtcacgcctcccacacttctttcctgacagtatgtcatgaaaccctactgcatggaatcctgcctcttagagtaggattccagggatctcaaaaattgtttagaaatgaacaaaaacagtctagttggaagagtatcaaagaggaggcagttgcacatgcagagaactctgaggtctgcaaatatacatgaactgatgagcacttgtgtgtaaagaaacacctccgaaagagaaaagaaccacgcaaagactcttgagggaacacctcacagagctcactcccacacacacccacccacgcactcacagacactcacacactacagtcacagaggaaaggcctgacttacagggcatgaggttgactcatcagaagagctttgcctcagtactggggaaaaagtcaccctagacaaaatgctgctcaggtctcaactatgaaagtgtaaaagcaaacagaaaactcaaactgtttttctgaacagtaaagtaactttactgaattcaacaataaaagacagaaatagagaatgaactgcaaaagaattctcaacccagcaggaaaaatgcacaatgccttcatcctgtcaatatttcctgcaaggtaaccagaaaatatatgctatatcaaacagagaagtgaatcaatcccaaatggcaataaaattgcacacatgatagaccttgtaggcaaggatatgaaagaaattcttataactctattctattctacttgttcttgaggatataagattgaaaaatcatattaagtggatacataaaacatataaagacagacgcaagttatactcttataaatgatccataatatgtctgcaataaaaaatacactgaatgagactgattgcagattggattctgtgaaagaatagatgagtgaacttgaagatatggcaatggcagctattcaagacgaagcacaaaagcgtaaacagagtatcagtgagttttaggacatcttcaactgcctaaattggtataatgaaagtcattaaaggaggtaagattggacagggaagagaaaaggcagaaaaacaatttaaaggaacaatgaccaaaatttcccaaattttgtgaaaactagaaacctcctattccaaaaagtttaacatgtcccaaagacacacacacacacacacacacacacagagagagagagagagagatagagagagagagagaaagagagaaagggagagagagagatacaggtgaacaacaaaatgacaagaacaaatttggtttttaaaaatttttttaattttagtggcttcatagtaggcatatatttttattgggtacacgagatgtttcaaaacaggcatgcaatgtgaaatagccacattatggaaaattcggtattcattcactcaagcacttatcctttgtagtataaactattcaattacactcttttagctttataaaatgtacagttaagttgttattgactatagtcatcctgttgtgctgtcaaatagtaggccttattgattatttctaactagttttttcttacccagtaaccatccccaggtaatagttgatttcttattagaagtaatgcaagcctaaatcagtggagttacatttagaaaatattaaatgaagaaacttactacccaaagcaatctacaaactcaatgcaattcctatcaaaataccaatgatattattcacagaaataaaaaatcctctaaaattggtataaaaccctaaaagacgctgaatagccaaagcaatactgagcaaaaagaacacagctgaagatatcacactactagaattaaaatatgctacaaactatagtaaccaaaacaggaagttattggcatgcaatcagacactgagaccaatataacaaaatagaaaacccgtaaataaatccatatatctatatatagctgactttcaacaaagatgtcaagaatgtacactgagaaaatggcacaattttcaataagtggtgctgagaaaactggatacccatctacagaacaatgaaactagacacttatcctctccacaaaaaaatatcaactaaaaatggattaaaggcccaaatataacaccccaaactataaaactactagaagggaacttaacataggggaagaacaaattctttaggacattgttctagataaaaaattatatggccaagacttcaaaagcacaggcaacaacaaataatagagatatgggacatcattaaactacaaagttcctgaaaagcaaaggaaacaatcaacagagtaaagacaacatgtagaatgagagaaaatatttgcaaactgttcacttgacaagggcctaacattcagtgtatgaaaattttaaaaaaactgaaataactcattagcataaaaaaactaataatatcattaaaaatgggccaagaatttgaagagacttttctcaatagaagatatacaaatggccaacaggcatacgagaaaaatgttgaacatcactaattagtgagggaatgagaatcaaaaccccagtgagatacaatctcaccctagctggaatggctatgatcaaaaagacaaaaaatgcaaagctggtgaaggtaggtgacttcacatttctctagtccgattctctgggaacaatgagagtgctctgtctttgctctccctctagtaactatttttcacacgcaaaaatatggaccctagtgggaaataatgcctaagaccaccaacaccttaatcatttgttcatcacactagaaatgaaactgttttccaaataatattaacatctatctgtgtctatcgccattgtgtcaatgtctgtgtgatcctataacatttagaaggcctagaagaatgcccttgctttttgcaatatgaaaatggccgatatcatagatgatatagatatagatagatagggggttgtattttgaaatgtatttctctaaaggacttctttcacttcaaatttgaaattattcttgttttaaatgtcacaaatgataaaccttatagaatgataacacaattgtatgtgttataaagtcacagggtctatcaaatgatgaaccaatcattcggtgttgaggttagtagtattttttttatttcgattctcactaaatgagaacacgttttgtattgaggggccatgccctaaccataccacatcgtggggttgctcagagactgtgaggttctgcccacactaagccagaaggagaattttattcctaagccaggatgagaattttattcctcacactgctctctgcacttgtttgtatcccataatatcccccaaaagtgagcatgagaagttcattttttaagctgcttgttcattctcttacatttaatacatgtaccaaaaattgtcttcatttttaaaataaaatgttatgctatcttgtaatctataaccctatagaataatcttgatccatacacttttgctatcacaagcagaacaagatccacttcctctctctgggataaatcccatgaccgctgctctttgagcattatttttcttaagttattttttaaacagaaatttatctgacttaccttaaccaaatgtcttttcaaagtaaccgcatttcttttaagtgaaaaattaaatagttaccttctgttatcaagaattatctgaatacaaaatatttattgtttcaactttagaaggaatgaaaaacatctacaggttactaatctaaaaatgcaggctctgggtttctatggtgttaacatgtcttccaaattttaagtaacaggtatttaaataacatgaactttgttttcaaacttagaaaatgtttcaaccttttggctgggcatggtggctcaagtctataatcccagcaatttggaaggacgagctgcgagttttgtctgatcccaggagctcaagaccagcctgggcaacatgatgaaactccatctctaccaaaagttataaaactttgccaggcatggtggcactgcctgtagtcccatctactcaagagactgagatgggaggattgctggagccagagaagttgaggctgcagaaggtaaactgtagaggctaaaacatgataaatatttaattcatcacttaaaagaaatgttggttacattgaaaagaaatttgattaatgtaattagatatatttctgtttaaaaaataattgaagtaagccctgttagcaccactgcattccagcctgggcaacagagcaaaacctgttaaagaaagaaagaaagaaagagaaggaaggatgaggaaggaaggaaggaaggaaggaaggaaggaaggaaggaaggaaggaacgaaggggaaagaaaaaaaggaagaagatatttcaagctttacagtaccagagccactctgtaatcaataagcaacaggaccaaaacagaaagagattctgtagaacagtctaaccagcgatacaattatacatttctgttcagatatcaaaaccattttcaatagtaaatatatggaatgaactccccacagagatcaagtaggatgtatgatgtgtgaatgaaattatgagttgagagtaggaaatttataaatttaatcaaacaaattaaagcattatgaggaagttgtactgctaatgtattacttggcaagctgttcagtggaacaccaagatattcttaaggaagttgcaaatatcttttaaaatgttatcattgaagtggatttttaaaaaatgaggacatgaatacctttacaaagtattcagggataaagagagaaaaataaatttagattgtgcatacatatataaaatttattttaaaagataagcttgtcttttttatcccttaaataaaaggagcagatatttaaattccttgtcttttattttaaaatttagaaaatgcttacagcttcccacactgaaatttatactaagacagataatctaatcaagggataacaaaatcaaaacagaattctcttgatgaatctattttcttgatttttaagtctcagtgtgtactctatagtaaaactatttataattgattctgctgtttgaaaatatttactgatcgtttatcttgcaccaagtgatctccagctctgaagataggtcagtgggaaaacatacaaagttgcccagcttcgttaaacttaaattctaatgaggaaaaaagaagtaattaatcagggactttaaaacaggagtgttgtgatatggcttggaattctaactgcttcctgtgcttgctgtgtggagactggattgaaaaatagggcgatagaagcttaaattcatatagaatatggctagcctgtattttgagggcccctgaaataagaatgtatagtagttctcattatttcctcaagaaatctgtgcagtagagctttggccttgggagggaagtactatagtcaccaagtggtgagggtgggaaggtgaatttgcaaataccacttggaatgagttcactttaaaggtaaagctggcaggattttcatacatgtcagatctgaaaaaatgtgtgtgcgtgtgtgtgtgtgtgttatagagagagagagagagagagagtgaaaaccagacagataccgagagagaacgacagatctgcagtgacagagagaattaaaagcggacaccacgaatattgagctcagaaactataaaatgggaggtgccattaaacagaatggggaagagcaagtttgaggagtatcagtggctccatgtggacttattgattttgacattcctaacagatgtccaaatggagaagtcagacagtgttgtgcgtagtctagtgttaaggtatcaaagaaaatatcaggaaatgagtgacacaaaaattagtaagaaagcaaagataagaaacattagtcaaagtcctgagtccagtggttatctaacacccaaaaagtagtaggccgggtgccgtggctcatgcctggaatcccagcactttggaaggccaaggcgggcagatctcctgaggtcgggagttcaaggccagcctgaccaatatggagaaaccctatctctactaaaaatacaaaattagccgggtgtggtggctcatgcctgtaataccagctactcaggaggctgaggcaggagaatcgcttgaagcagggaggtggagggtgtggtgagccgagattgcatcattgaactccagcctgggaaacaagagcaaaacttcatctcagaaagaaaaaaaagtgataaagacaagaagaaaccagcaaaaaagtactaggggtaattatcaaaaatgtcaaagggaaagtaggttaagtgttctggaattctctcaaagaaagttttgaaaaaaggagggaggaagagatcaactgctttcaatgctgctgatacataaattaagacaaaggctgaggaattatgcttcaattcatcatttaacgatatggatattgtttgtgctttgataagagcaattttcttggagtgagtaggtgagaaaccatattggagtggtttctcaaaggaatgcctgatctctggattcttaaggaaactttttattgaacagtggaggcacaaattggatttgttttaattccggggtcgggacacactctaaacatgtgcctctgcatgcctcgcttattacagctaggtatcctagtatctttcagtaacagaataatcacctgcaaaacccacacccatttaatagacacgctttacaaagactgatactagaagttgttggagaggatgtggttccacgtaatatcttatgagtcactgatgggcaagtaagctggtaaaatgtctttggaaaactcactatacctgctatactaaaacattcagataccaaacaccagaaattccatattgtaatatatttctatgagaaaaaaacaagagccctgtattaaaatatagattattattaaaaataatcacactgggtttcctgatttttttattagcaagtcagtctctgcctgattcaatagtacaacctctatctaatatatatatatagtgtttttaatcaaccactaagaaaaagtattatattttatatcaattctacattcagtgccgaaaccagcattttgtagattccagagatttgttgaataaataatgaataacttaaataagttaatatttatagtatccatatacaaataatacatcatctcagaatacaataataacgtttgttatgcagaaaatgatttcaatctcagttaaaaatattttgggcttaggagttactgtcatatatggatgctcacattgttttgtttatacgaaaatgtttgtagttaacgtacgtttttggtacttaagccttttgttcttgctgccatagcaaatagtgtgcctattaggaacaagaaccagaggtttacttcatcttaacagatttcttaataaaatacatgccatactgtttggtttaatgcataagcaaagagtcattcactccgccattgctacgtgtccctcctctaatacggctcctgaagatgttaccgatagcagaggactttgtgttcaacctaagcactttatagccctttcactttcaactaagtatgagataaaataattcagcaccaataaaacaaacacttcttaaatactgaccctttttttgagcctgtttcacgttacgcagcaagacagagtacacttctctttcccagcaaatcagtgttggcactacaccctctacactctgaaaacttgtattattggcttccttagaaacacaatttgagcttataatttagatgtcatcaaataatgtacaaaaatatgctacttccttccccttcacttctcttctcttctcttcttatcagataattgtcagttgttttttctctccaactcctttcctccgactacctgatttttaaaagactttctgcacatttccaatcttagtattgtagagacaaaatgtgtggtcaaactgcatatataggaagagctgaattatatgcaagcatttttaaatacacaattcctcctcagttttctgtgattatttcatataatcaaatgtcttccagatacacatcccaaacgagtggttgtcaagctctgctttgtggtctaatttcatcagaattatccaaaattcttatgataaatacagataaattgacataactccagatttatgaaatcaacatttccagaacccaggaatatgcattgaaaaagtgtattcctcagatgatgctgacatgatacgggatccgagtttacaatgcaaggaaaattaccttccttgcccttcagctgacccttgtatccagaggtcctcttcccctttcatattctgccctctctccttctgcacctttctcctttcctccctccagttctgctcatccagatcccaagccctcccccatggattccctaaacctcccaaatggtcagttgccactaaagttccctctgtctcatgaacaagttatgtgggcaaatgtaaaatttaagcttggaccaagctgactcaagagcggcaattacaaatttccctaaacccagaggggaccagcaaacacttgtagaagattagagatttcctgtgagtgcaaagggctcagagtgtcctgatgctgtagaccaaatcttactgtcccctccaattcatgtgttaaaatctaattccctatgtgatgggatttggaggtgaggccttggaaggtgattaagtgatgaaagcagagaacccgtgaaggggatcagtgtccctatcaaagggacggctgagaactcctcatcccttctgtcatgtgaggacacagtacaaagatggccgtctatgaaccaggaaggaagccctcaccagacacaaaatgtgctgaccactcactgctgactccagtgagtcagaggagcgcaggccacatacctgggtctctgcctccatgcctcccacagtgcccagggctgagagcagagtggcagctgctgactggggctgtgctggccacctgctctcttctacctcttgctcaagccatgctttcagccccatggctgaggccagtggctagagcaggtgccatgatgtcaggcagctccttaatgggctggtccttggcaggaccagggcaggggcaggagggctctgcagctgcctctagctccagttctgtccctgaagggggctcttcccctagtgctggcactggctcatcagctggtgctggaaggtcctggattgccgcacattgagcaggagatgaaaaagaagaaagagtcaccaatgtcagtcactttccactggaatttccacacacagaatcagcctcactgaattaaaggaattccagtccaaaaacactgcccccgcaaagtctccaaaactacaggccccccctcaccatgtgcctgtgcctggaggaactccagaggctccagcaggccaaggacaatgcacggatgtggcccggatgggatcaccagtgaggcctggcctcgtagggcctgcccagggctgtcctgtggtacctgggtgcgccttcggccagaggtgcctggggtgaggaatgagcctgcatcggcatcatgggaaaaggctgtcactctgggccctcctgaagcaggagcctcaagatatgcggatgcagcatgagaacatcttgctctcctgagcatctcccaccaagggaactggctgcgggactgtctctaggatgtgggtgcctggttaccagaattctaagttctgtgagggtatatcaccaaggaagtgaagtcacttctttaaggttccgtatcctcagccccttccttccataagacctactcagaaccccctgggctgctggctgctcaccctccccccaggccagatccttacctgtacacaggtaagtccacccagggcctgcttgtacacgtgctcctgatgtgcacctgggacctaggaatccacttagggcctgtgatccaacaggggcctaatgttgtttaaaagtaatttttattattcctacaggaaagaaaaggccttctagcaataagaagcacagtttcacatcaaaaacataaaaatgatcaaaatcttggggaagaaatgtatcaattttaatcactgaaatgttaacttttgataaatatttaagtttataaggaaaaataaaaccatgctgataaaaccacagttgtagggaatgctatagagtttctcctttgtggtttgaacacagaaaggtcccacctagttaggctcataattttctaccttaatcttcttgttcttatgattaatggaaaaaataccatgacaatgatggtgatgatggttcaagtacacactgaggtttagtgacagaaacatcaggtgctcccagttacagtgcagctgttcttattggggtgggaaaatcaatcttgtgttcagtatacacgggaagcaggagtacatgtggatatgaccacatttcactggacttatattttaaacagaagatctacagtttattcttcaaaaaataataacacttgccatgcaaagtatatatataagatgtctcaaataattgtacttacattgcatatgaaagtgatacattttgatatgctaggtaaataaagtaaattatttaactcatttacttcttccctttgtatttttaatgcgatgactagacattcagatttccatgaggctcacatcatattgtgaatgaacagtgctggtctgcaccccttcaggttacaggggctgaggagtgacctggtgcaggaagccccatctccatccataggacattggtgtgaacccagggagaggcgctggtgtaagagagatgagaacacaggtgtgaaccacctgcttgtgcaggggactgagccttcacataagttgacacttaaaaagccaccacaccccacccttgtcaacaggaaacccattcacatctccatcagccacacaatctccaagattcttcaaaaagtaataacaatagccatgcaaagtatatgatatatatcataaataattgtacttacattatatatgaaaatgatactctttttgatatgctaggtaaataaaatacattatttaaactcattgacttcttctctttgtatttataacatgacaactagacagtgggattcccatgaggctcacatcatattgtgattgaacaaggctggtctgcagggcttcaggttacaggggctgtggagtgacctggtgcaggaagccccgtctccttccataggacatcagtgtgaacccagggagaggcgctggtatgagagagatgagaacacaggtgtgaaccacctgcttgtgcaggggactgagccttcacttggagccaaagttttctttcccaggttcaatcctgaacaagagggccttctggacttctttttgttttcaggcttgtgccccttcaggtttggggctgtctggatcccagccaggggacactgaggaaatccaggagtctcacactgactgttctatttcatctgctggggccatcccaaactgctgtgtaccatttcctttcctggtgctcaaatagctgctccatgcccttgtcatggtttcagagatgaatctaggtgggaagacaggacagtgtatgttataatatttaaatggaagctgaatccattaatatttattttaatatgaaacattaaaagaattttgtcataagcaatgaggaaagaggaaaagatattcaagttattttgagaaaaaataaaaatgtatttatcaaatgtctgtgtgtcttcagtgtcgcagggttgagagcagccagctttaggttgccctgaggatgcgctcagatgggaaaaagcgagaaagcaggaaacgcgtctctgtgacctgacagataaatcacagtaatggaaataagtctttcaataattcaaacattcacaataaatatcactctgatgcacacagaaaggcctggtaacaaactttccctttgacctgctggctcatatccccatggatcacctgtgtgcagagtggactctctggtccccatttctcaggctgagaactagaggctgggaaggacaagtggcctgctcatgagtgggaagggcgggattgggagcagcagactcgggctcaggactctggccctggtcagtgctccttgttccctccacagggtccctcccacatgtgcccgtgtggatgtgggtgcactgcctggggtggctgatgtgctccagggattcaatgcggcagatgcttcagcaccaaaggtagggagtagggatgggacgaggctgcagctgtggagaccagggacccatgatgcccagcagaggtttccacggggtgggtagccccatttcctgacagtagagacagcctagaggtgggtgccaagcagagggcactgtgccatgtgcccaggcctggagggccacagagacacaggcgccacacagcagagacactgagagccaggagctcactcaggtaagggatgtcagcagatctttctctcctgagcaaatcaggtacaaaaaaattaagatcctgccatcagaatagacaaacagggactttaatctcctcggctgagccccgctgtccagggaagaagaagtctctgagcccaggcccaggtgagggtggagtgaggagaggagctcagggtgcagatttgcataaaggccccgccctcctctgaggcagaggggataagacagggctggggtcaggcccagtgctgggatctcaggaggcagctctctcggaatatctccaccatggcctgggctctgctcctcctcaccctcctcactcagggcacaggtgaggcctccagggaaggggcttcggggacctctgggctgatccttaactcctgctcctcaggctcacctgggcccagcactgacttactaaaatgtgtttcttcctttttccaggatcctgggctcagtctgccctgactcagcctccctccgtgtccgggtctcctggacagtcagtcaccatctcctgcactggaaccagcagtgacgttggtagttataaccgtgtctcctggtaccagcagcccccaggcacagcccccaaactcatgatttatgaggtcagtaatcggccctcaggggtccctgatcgcttctctgggtccaagtctggcaacacggcctccctgaccatctctgggctccaggctgaggacgaggctgattattactgcagcttatatacaagcagcagcactttccacagaggtccaagttcctggggaactgagaccaaaacctgccctgggctctcaggccccctccttgctctgaagatgcttcctcgcccagtgcaagcggcttcctgcagtgcggccttgagaattcttctctctcagctccttccctttccaccatgaattccaaaaggaaacccgctctgtggtttctcatccaggacagggacagcttcctgatgcttgtgcgctgtggtccctcaatgtgcagctcttcccagctcttcaaatgcagggacagtgacaaggagctgcctgagtggtgcagtcactgcttttttcagggatgtcttcaccctacatgcatcaccatcccctacactgtgggtagaattttagcaactacattctaatggttatcgccacaactttgatcttaaataacagtgcagcgaacatccctacgcagactcctttgagttcctgtgtgaatatgaccacaggattcatttctaaaagtgaaattgcaggtcagaaagattgtgtgtttgtaattttcacccattgttgtcagattcccctccagagggattgtaccaattttcaatgccagctggaagtacttgttcagagtacattgttgaaagtggaaatttttgccagcttatcagacagaaaaatgttaccttgttacagttttatttttgagtctcctgttctgcttacattttggccctttcagaaatagttcagtactttttctttttttaggatttagtaaactttataaaaaatatccagataaggagaattttagtgtttgtgggcaggcacagtggctcacacctgtaatcccaagcacttcgaaagagtaagacaggtgaattgcttgttcccaggagtttgagattagtctgggccacacagcaaaccctcatctctattaaattaatgcaaataaaaataaattttaaaaagaattattttagtctttgtggcccaagaatcaactttagggatattacataggtacttataacatcatttacaatgtaaccatttaaaaagataaaaatcactgttatctctgggccatgcaaaaacagttgtcaggccaggagtggccacaggatgtggttgaacggtccctggtttgcagagttatctgaatgttgaaaattccaccagcatatgatctaggtggggatctctctgtgagggtcactgtatttcacctcctgtattcggctgaggtctttccttggataagaacatgctcacatcatctatttgatgggctcatgggtttgcccaagacaaccctgtgtcacaatcacataacttttatctgcattgcttgttctgagttttgggagagctttaatatatcaggaatagactcctcctaagggaaaagtctgagggatatggatgggcaaggggtcaagaaagcttctaccaaagctggaatatccagggcaggctcagagagaaggatcctaatatcagcatttgactgaagccaaaaccagaagagaacatggacgttctgagaataataagtaaataaacagtttaaattttaaatgtattgaatattcttatactccatgaaaattctagaacggaatttaacaatgggataaggaagagagcttgagatgttaaactataaagaccacaaggcaagttgccaggaaaagaacaggacctttttagtggaaataggtttctgctgcaaattacctttcctatgaaattggtttttaggtataaggaaacatcccatggaacattcttctttcctacagtcaagatcaccctcaccccacaagggaacctcaatatcaaatagaaaaaataatgcactttgtataaccattaggagagtctttatttgcacatcaaaatgaggatggttaatggtaacattggaaatagtagtttaatatgcataagtgatgaatttcttttgactataccatttctgtctgtgatttatctttcttaatagggacatactctgttcttaaaacaatttaacttgtgttatcttttgttctattatctgtatcagctctgttttttttttcaaacactggcaaagttattccatggttaatgattattaaattcaatttatggatatttagattatttaaattatttcaagagtggacagatgtgatttccccacatatacctcacagatgttgctgatgctgacttgttcatctcttccaacctctgcaaacaaagtgggaaattggatttttctgaacacccagatgacaacgggagaggaggtgaaacccccctaaagctgttatcctttaacccctcatggtgaatctcccatccacacttgagttggatgatatgtaaatgagagtttggtcttagagttggtgctgagttagttcaggatttgggttattgggatggagtgaatgtgctttacaagtcaaaaactatgagtttttgtgtgcataggttggagagctcttggctgaattgtgtcccccagaattatacaatgaagttctaatgcacagtgtgtgactgaatttggagacagcctttacagaggtgattaagtgaaaatgaggtcatgagggtggcttcttctccaatctgactggtgttctgagaagagaaaatttgcacacatagaaatgagacactagagatgagcatgcggaggaaaaaccatgtgatgacacagcaaggaggtagccacctgcaagccgaggagagaggcctcagggaaaaccaaacccaccaacacctttatcttgactccccagcttcagaactgtgagaaaataagtgtctgctctttaggccagcaggtctttggtatctcattaaggtagcactagcaaatgaaaacaaaagggaccccaaagaccttgggtgccagagaaggaggagatggaggatggtgcaggaggcggggcagggaggggctggaagttcaggctctgaggtgcatctcttgggtgcaatcctgactccactcactgctgtctggggacttggggaagaatcattaacctcccaatattaattccataataaagattgggtcttgagcatagggctgctcatcctcctattccatatgatgcaaatcttcttgaggtcatgcttgtaaaacactcagcaatgtatctggcatacactatggcctcagaagtggttattctgaattttctagtgatacatagagaatggcattgttcctgtgggcagaggaggcactgtggaccttggtttgaggactcagaaagacaccaagtcctctggtagtgctcaagtgcgaagagcgtcacagatgcttcctcccaggccccttctattgggtaaaatttactctccactcctgacacccatctggtccttcttctgaccttagcacattatcagtttgaagacttaaggctcagggctcagatgggagctaggacaggcacactggggaatgcggagtagatttgcattcactgctcatcagggagcccacccaacaaggatacaagaataaaagaagtagatttgcatgaagagcctctccttcctatgataagagagggctgaaggtccctccccgctgtgggctcagagacagagctctggagcatctccaccgtggcctggacccctcccctgctcaccctcttcactctctgaactgcctcccagggctcagcccccaaaggaccagagatcagcctggacctgagcttcagctcagcacagggagtgatggagagtgtggggtctgggaatgaccctcatcctcataattacctcttctgtcctctcttataggctttgtggcttcccgtaagctgactccagagccagcagtgtctgtggacagtcagcaagggtaacctgccagggagaaaacctaagaagccatggtacaaactggtaccagcagaaccctgccagatgcctgtgcaggtcatacatggtaacaacaaccagccctcagggatcccagaccgattctctggctccaagtcaggaacacagccaccctgaccatcactggggctcaggttgaacatgaagctgactattaccgtcactcatgggacaacagtggtactcatctcacagtgacacagacagattggaaagtgagatctaaagaccttcactgtctgtatcaccctctttctccagccatagcaggactgagcagggctggcccgggtcacctggatcgaagcccttcaggctgcccttccctccagccctcccggcagactgcagagagtaggtcaggataggatttggggctggcagaaccaggctgtcctgctgttatttggaatggatgtaccttggctcaagatgacctgagtggaaggacagtaagagggagacagctactgagtgctcatggtcactgaatttcctcctgtgtgttgactgaacccaagacagtgcctctactctgtggcccaaataccctggattatttctctgaactgcccatgtttaactgagaccctcaagccccagctttgtgcatcctgatgttctgaacatggaagcctttcataatgtgcactgtgacatccttcagattcccatttcaggacttatgcacccaccatccacccagggctgcagggagttcctggcttctcacagctcttccccaccagaaactgccatgcagtacagagaatagctttgctcaaagaattgcccatttcaaaatgtgtttcatgggcagtgactccctgattgccttaatctgaaagtcatgctttaatttaagaccctgaatatcaaattgaagtgccttctagctgaacgctcaattgtaaaacattcccagtcacacactccacacttctttcctgagaatgtatcctgaaaccctactgcatggaatcctccctctcagagtaggattgcagggaactcaaaaattaaaaacaaacaaacaaaaaacagtctagagggaaaagtattgaagaggagagagagagtgcacaaggagacaactctgaagtctgcaaatattcatgcactgaagagcgcttgtgtgtacagaaactccctctgaaagagaaagacccttgagggaacactccaaagagcgcgcgcgcacgcgcgcgcacacacacacacacacacacacacacacattccagtcacagaggaaaggcctgagttatggggcatgaggtggactcatcagaagagcttcggctcagtattgaggaaaatgtcgccctagacatagggctactctgctctcaactaagaaagtgtagaagcaaactgagaaaagttaagacagtttccaagtaactttactgaatccaaaaataaaagacgaaaatagagaagaaaatgcaaaagaattataaactcaacaaagaaaacttcacaatgattggcattcaatcaacatttcctgcaaggaaaaaagaaaatatatgctctaacacagagaaaaatgaatcaatccaaagtggcaataaaattgtatacgtgatagatagaccttgtatgcaaaaattttggagcaattcttataactcttctccttgctcatgaggatagaggattgattgaaggtgttaagtgaagaaatggaaggcatgaagaaaaatccaagtttaacttttagaaatggtctctaaatatctgcattgaaaaaatgcactgaatgagaatgattgcaggttaggtgctgtgaaagaatagttgagtgaacttgaagacatggcaatggaagctattcaagatgaagtacaaaaaaagtgaagagagcaccagtgaatttcaggacatcttcaagctgacttacttggtataattaaaggcatgaaaggagataacattggtgaggggagaggaaaggtagaaaagccgtttaaaggaatcatggccaaaatttcccaaatttgttgaaagctagaaacctacaactccaaaaatcttaacaagttacacacacacacacacacgcaagtaatacaacaccaatactcatcataatgatattgctaaaaaactatgataaagacatacttttaaaagtagccatagagtaaagacatggtaggtacaggcgaacaacataagaagaagaacagatttcgttttctttgtaaaattttcttcaacatctgggggaacatagtagatatatgtatttgtggaatacatgagatattttgatacaggcatgcaatgtgaaacagtaacatcatggagaattgggtatccatcccctcaagcatttatcctttgtgttacaaactactcaattacagtattttaggtattttaaattgtacaattaagttgttatcgatgtgctatcaaatagtattgacataactctgatgcgctatcaaatagtaggtcttattcattctttctattttatttacccattaagcatccacaaataagagcagatttcttcttagaagtcatgcgagcaggaagctcgcatgtggagctatatttataaaatattaaaagaaaaaacttactacccaaacccatctccagaccatgaatttctctctggatatcttattaaaatattgtctcctatcaaatctctatcaaaataccaatgacattcacagaagcagaaaaaaaattctgtaactggtatggaaccacaaaagcccctgaatagccaagcaataccaaacaaaaaaccccaagatgaatatatcacattatctgaatcaaaatatactacaaattatggtaaccaaaacaggatcaatggtattggcataaaatcagacattgagactaataaaattgtatagaacacaccaaaataaattcatgtatttacatccaactgattttcagcataaattccaagaacatacattgagaaaaggacgcacttttcaataaatggtgctgagaaagtggatacccgtatacagaagaatggaactagacccttgtctctctccgtatacaacaatcaactcaaaatctattaaaaaccccaagtataagacccaaaactataaaacaactaggagggaacgtagaggacatagggaaagttcttcaggacattggtctagacaaaaattccatagctaagacttcaaaaacacaggcaacaacaaaaactagacatatgggacttcattaaactaaaaatcttctgaaaagcaaaggaaacaatcaacagagtgaagacaacttgtagaatgagagaaaatatttgcaaacaattcaactcaaaaggacctaagatccagtataagaaaataagacaaggagctgaaataactcatcagaatagaaaaccagtaatagcattaaaaagtgtacaaatgatatgaatagacttttcacagtcaaagacatacaaaaggccaataggttaattaaaaaatgcccaatatccctaatcaccggggcatgcaaatcaaaacctccatgagatatcatctcatcccagctaggacagctatcattaagaagacaaaaaaataacaaatgctggtgacgatgtagcaaaaatagaagacaaaaccacatggtcatctcagcagtcacatcaaatgttttcatgtaaggaaacattaccatttgctgtttttctagtcttgctagagcaccataaaagataagactagtggtgccaatactgtagaaaatgttattacatgcagagaatctcactatcccataccaaactacatggattcttactgttaaatgctaaaagattacaactctgcatttccaaatgttctggtggtcagagaccacttccttgacaagtgatgagtacggtgatgtgaaaggatagttagcatttacgcaggtattgggtgaagaatagtgatatacacaggaaagctttcaaagagagaaacacatggaggttggaacacagaagagaacataatatgtctgagaaataaagaaagtccagactcactggagctgagtgagaacaagaaaaacggcatgaaccatgtatttcactctggatatctcattaaaatattgtctcctccccaacacaccaccgatgtgaattgtaaaaatgcccgttcttaaattattttttgcacatcatgacagggtcaagcatgtgaatcaagctgagtttgatgagtccaggtctgtctgatgagtccagacccaggtggcctcagaaggacttggtggaacgagggcttgttgtcaaaagtagaggaagtgagattttccattgtggcttagacaagagattcttaaatttcagtggacacacaaggcccctgaggggtctcggtaagatgtagatgcagcctcagcagttctggatgtggccccaaattctctgtgtccagcaactcccaggtgaggctgctgctgctggtcctcccaggaccacactttgaatggcttagctcttattcacccacctcactcaagccacaggtaagactcacacaaggagagcatattctagaagcacaggtcacttctcactcctccccttgtgtcttagatccttttctgttacaacaaagaagtacccaaggctgggtaatttatagagaaaataaaaggtttatttggctcacaattccaatggccacagagttcaagatatggcatctgctcttgttgaagacctcaggctgcttctagtcatggtgaaaggtgaaggggagccagtgtaggcagaggtcaatgggggagaggaagcaagagagaagaggaagatgccaggctcttttaaataaccagctctttcggaaacagtgggaattcactcaccccaagtgaggacattaatctattcatgagagatccactcccatcaccctaaaagctcccattagttcccacctccaacactggggatccaatttcaacatgagatttggaggcgacaaagatcaaagccatagcaccctgaggtttggccacgcacttgctcatctccacatttgtccctcccctcatgactggggtcctgaccactctgactcagtctccctccacttcatggacacctggcagtcggtcatcatctgttttgctgaatcaacagcagtattgggggtattcaacattccacatttgtattgtttgaaaattgcccaatcttaggtgttttgttattgctacacaaacagactaagacatttactatttaatggttacatttcattctctttttatgaaattttgttgctaacagggactttctgcttggtcagaagattaacaattgtgtctcctggttccaccagaaacagagtagagacccacacagctgaggtatggggtcatagattaaaactaagagacataagattgattctcaggctccaagtctggcaagtgagcttctttgagactccctgggatctcagcagtcagactgatcattattgctgtcccaaacatcctatgtgatatggaagtaatatcaaaaccctcctgagattcctgacttgtgtcccgacatgaagtctgttgggattcctgtcattccttcaagattgttcaaataagcagcaacaatcactctcatatgagatatgaaaagaagaattccacatgaaccaaaccctgaagcccacactgaagtctgccaagttatctgcagtccagcgcgatggagggagcattttcgtggggacttttgagagtatggagaaggcctgaggaaacgaggctcagctatgggttccagaaacaaagctctgggatgtctccccatggcctcgacctctcacgtgctacctctcctcactctttgcacagatgctgccccaggctaagcccccacaggaccctaatcctagtcctgaccctgagctcagcccaggtgatatttcaggagatgggaccctgagaatgagccctaaagtctccttatcctgcagcccctgtggtctcttagactcagctacccccagtagagttggccatgagacacctgtcccccacctgctcaggagagagtgcagcaggcaacagtgcagagagaaccagcaggagccaggccaggcgctgcattcagagcagcccccaatccaacagattctccagctctagcctggggtacagcccccaccttctgcgggctgaagtgggcttctcaggatgggcaggccatgatggggattggcagtgtgtccatgggacacagccctactgcctgcctggccctcatgccccctccctccccatcctggttaagcaccaccccaacgggcccagtttcagaactcaggacacctgggccagctcctggacttgcccccactgctctctgttctcctgagccacttagtctcttttggcctcagtgttacctgctgtgaagtgaggagccttatactgaactgaggaagctctttcttcattcaaaattaaaagacagaaaaacaacgaaagtcatgcgaattaaagcctgatgaggggatgtcacttaatgggcttcaatgggcttcagacaaaacttcttgtctttcctctgcagggattccaagaaagggactcaaaaagagcttgctttctgtatggtgggaagagcagtccccagctgagaataagcaggagagtcccagtttaatcaggaagacagactagggtagtgtagaaatcctctcagcacaaactctgagaagtatggaatgaaataaagacaaacaagaaattaatggtgccgacggtggtgatgttagctcacagctaagctgcagaaccagaaacatgcggtgatgggctgagtctcctccaccagctgggggcagcagagctgcagccaggagctttcaggagagaggctggggctgcccagctggggcaaagagaaggccagcctggggttcaacaggtgtccaagaatctgtcttcagactgaaagtgagtgcagttcatcctatcccctcaggcttcagtgaccacgctctgagggtcagacacacggtgtcaccccaggacactgacagaagcctggcacagtgaaggcctcaccagggaaatgcagctggaggaggctgggcccagatgtgagcttgggcagcttcctcaggaaggggaatccctgggaggcgtcccaaggtcgaggtgctctaggagggggtatagtgtgaggtgatggggctcccagggcccgggttcttcacccaggatggcggcctgagcctcctgccactctcagggtgtcatccctcctggtccagcagtgtcctggggagctgagccctctgtcctgggcacttccagatacacccgacccctcctccctctgcctttccttccagctccaggcggactctgactcagggggcagctcctgtactcaggggagtctcgggtgggtgtggtggggcatttgggaccctggccctggatgggcatccccagcctccttcaggagacactcttcagagggacagggcttctcacctgcctcaggccacagctctgaccatggtgctgtccacgctcagtgacaggacactgagcaggggcctggctggagtaaccagggaccacccaatctctggagctcacatgctgtgcagagaccatgaccctgggacccttacagagaccatggacctaacgttagattctcagtccagtgtggttttctgctgctttttgcaagtttacataaaatattgatgagaaaaacatgaataaataacagacaagttgacggtgctgattgctaatctcttgtggcaatgaggggtgatgtagcaggagcagcaccacgactgaaatgagaccagatgccatgttgactccacaggggtgtgtggttgcttaaatgacccaaatattcccactgaataatcagcaagtgtcctaatgacacagcacagcatttagatgaaatgaacaagaggggactgagtctgagggaccaggaggaggaagatcatgggtccctgggccacctgctgctgagtcaggtgtcatcatgatctctccacagagcccagctcagccccatggccaacctcctggaaggtccacagctctgctgagcctggcccaggacagaccccaggtcagcgaggtttgggacagtggtcatgaggttaattcccacaaaggtctatgatcacagggcttgaaggctgcagctgattttctaaccagagaccctgcttgttcctcctgttgcctgtgctgccctcacagctggtttgagagacatctctccaggaagagccacagaggatgtaaatttgcataaacgcttaacactgactgcccccgaaagcctgagagggaataagagaggcctgcggagcccaactgttctgtgggtccaggaggcacagctctgggaatctcaccatggcctggatccctctcctgctccccctcctcactctctgcacaggtgctgaccccaggcccttccccaggctcagtccccacagattccaagttgagcctgacctgaatcctgagcaaagcccagacacagcctctgggtgggactcctggaaatgggtcctttgtcttcaagccccctctcttgttcttccttgcaggctctgaggcctcctatgagctgacacagccaccctcggtgtcagtgtccctaggacagatggccaggatcacctgctctggagaagcattgccaaaaaaatatgcttattggtaccagcagaagccaggccagttccctgtgctggtgatatataaagacagcgagaggccctcagggatccctgagcgattctctggctccagctcagggacaatagtcacattgaccatcagtggagtccaggcagaagacgaggctgactattactgtctatcagcagacagcagtggtacttatcccacagtgacacaaggagacagggaagtgaaacataaacccctccccctctatttcatccccttccttctgccccaggaggactgtggacaaagccatgagcaggcttggccaaattcacccaaatttgaacccccaggctgcccttccctccagccctccaggcaggcgctgcaaaggagtcagtctgcagtggatttgtgcctggcaggcctggcagtcctgtgtttctttgcctggggtttgagttgttgatggagggtctgactggaaagacagacacagggagacatccatgcaggcatgtccagagggatgtggggaactctcaggtctcagttcagtgcagtcattgttgtatcctctgggaaagcattcctccagtgcacctaagacctctagacccacagagcctgaggtcgggatgagagaatgtcaaatttttgctgatggatcactaaaggcatttttgagtggagccactacaatttactccttgattctggactcgtggatcctgactgtgggagaaacagcaccatctattgggcactgatgcacagcacatgccccatcctggaagacattgcccaaccctacacatacttgccacttgcctggtgcagtaatggagtctccatgcagtcattaaaccattcatataagccacatgtctcagaatgttggggacaagagtaagaatcttgaatgccaggagaaaaggcccatagccctttatttgcggtgaaacgagttccttggtcagaacctcctgtggaataccatcgtgatgggtgcatcattctgtaatccagagataacagttttggcagaagcattgctgtcaatgaaagcaaatcctctgtacatgccaatgctagtaaggaaaaagagctgtctctcccatgatggaagagctctaatgaaattaatatcaagcaggcccctggctgttttccacagagaaggtcatcctatagggatgcctgtgttggtctctgctgttgacagattgtcacccagcagtggcttcagccaggccagctccagttagtggaaattcacattgatgagcccattatcagcctctatccctgccaccatggccacatttttttggagtctgttggacaatgacaggagtggttgacggaggctgcctggtgtccatagaacaggtcaccctactcacctgattagcaaaatcacttcattttcacagaagacttagtgagtatttatatatggaaaaaaattctcatgctttttgcccactggaggaggtctactcacacatctctccccctgacatatttgtgatcagtattcctgttgtatctctcccaagttcctgaacatccttgaccatattccaggaccctgagtcacagcccatgaattaggaacctctgcccatctctttgcaggtgacatgagccaattacactgcttaaaattctgctttaaggagaatgttcttccaccactgctgttcagggattctcagaggccaggtggagtactagcaccgttcacaccagtggtggatgcatgtcctgcagaaacatctgtaaccccagcctaattgcctcctactaggcagctgatctcagggagccactctggaggccaaggctgtagggtgagaggaaggcatggtgcagggcttgggtcatgtctgtttggccaactcttcacgcaacttacttggccctcgtaacctaatccctcaagtcacaaatacatccctgccgtgtgattggggagctgcctaaaatggccacccgggactgtgtttcagacgaaatccagcatatcagcaacttgagtctcgtggtgagctctgtggccacaatcacacagagcctctgccaaggctcaggagccctcgcagtctttctcaaatggtgttttctgctcattcaaaacaaaataagtaggggggggggctgctcacgtgcttccagtctgggacactaggaccacctaaaccacacccacgatcttgtctgattattttgattccttgttggctcagttatgcattatggcaaccaaaccacagtgtcattggccataaaatgccaatccttggtccccacctaccctgggatcccctcaaccacatcttgctacccagttaaggtttcagcaacactgagaaaaatgtatttttatattgagagaggaaacattctttcaattgtgaaaaatttataaggcaggaatgtgaaaatattttaaaagacattttacaaagggtgaaagaccctccattaaaccactcaatatatgacactgtaattggcctcccaaaccctgacttcagctctgggttgggaccttctgtaaaggggcctttcatcctcaagccctcctctcctctcctctcctctcctctcctctcctctcctctcctctcctctcctctgctctcctctcctctcagcctgtgcctcctacatacagagacagctgctctcagtcttggtggccctgagactgacaaccatgatcacatgctctggagataaactcaggataaacatacacttaggaaccagcagatgccaggccaggcctcggtgcttgtaatctggtataacagcaagtgaccctcagggacctctgcccaattcttaggctccaaatcaaggaacatggccaccatgaccattagtggggcccaggcccgcgacaaggctgactattactatactgcagataataacagtgggagcagctggcagggactcatagtaacacagagagatagggactagccacagtactgtcccacctcggcctgcctctcattctcacctgccctctgagcagctataggtcaggcctcagggtcaggtgtcctctctggtcttaacctggcccctgaggggctggaggttctgagcagcttctccatcctctcagggcctgcatgtgtccaatgagaagtggacagggtgaaggtggtcagagctgccaggacctttgtcaggtttgtggtgtacatgaacagtttaggaatccacacaaaagcacatggtcccagttgtaatcatacgtcatgcaggggaggagagagctgtcgcagagggcacagtcctgcagaatttctcctttccttgggtaaaaccagctcagtggaagccccaggggctgtgtctcctctggtttccagatgagttgacccccacattctaataggttgcctgatgcctgacaaggactggagacccagccccttttggcctcagggccctttctgtactgatatttctcagaaactgaagaggaagcacagacactacctttggtcccacctgggaactgtgtttggggcacactgacctcccatggcccccaaagtcccatcaccttccccaggtaggtcagtcctgactggatgtgcccccagcgccctgatagtttggagtttatctttgggctctgggctgctttctgaggagctcactaagaaacccttgatgccaggcccaggacctgcgcctctgctgcatgtcccagggctgcaggtgtgaagggagggtcctgctgggtgagggtgatgcccttttccaggagagatgtctgattccagtctctagggccacatttattgggctttcttttctcactaggatgtctcagtctttttatttccttctttaaaagtacaactggtttagggtgacctgctcgggtccccttccacattgtagaagctttgttatttcactcttcacaaaaaatctcgctgctgctcactctttgggtccatgccaccttaaaaaaaaagtacaactggtttaatcatgaaatcatgtgtacacactgaagtttacagattattgccatcagcatatatatatatatatatatatatatatatatatatatactgtttctggttgggacaactgtggacaaggccatactggggtctctgtctctctcgttatcacaagtgaggatactaacagctctcttttatgcagactgtggtcatgtttcccagttgcacacgaatgtctcttatggttgtttagtttccttaccagccaagacccttaagttttcatgcagacaattggatgttatttctctctgacccaacatttttcaaacagtattccttggaacccaacaaaagttccacaagaaaagctcaagtctctggtgcacagttggaccaggttcattgtgtgcagtaggaccttgctcaagtgatgggtccatttgatattttcactatcaaggggaagggtgttacgacttttgggcactgagttgatagagggaagatagcagctgatgatggccctacccaccaatgtgtgtgtgggcagtacctattgatggatttagaagttgagggaactgtttattctgcagatggaatttccagtactgaatctccagcacccagccactagcattcagcaggtgctctgtaagaagaccttcactgccaatcacagccattacacaggtgaaggagaggatgacttttaacagccactgactcacagtaaactgaggtagaaattcagcttcacaaagtgactttgagggaacagactgaggaagcaggttaattattcgctgaaggctttgcccagagcaggaacaatacagggttgatgaggacgtagggatgccctggtgtggaaggaacaaggcctgaaccaggagcaggaagaagcatgggaaagaccacgctgccacatgtgatgagtcagcacatggaaggcacagcaaatgttgcgcaaaggtttttgtgtaataacctggcaaacagctgcttctctatccagattcatgagccaaaaaatgttactgatgcattgctgtcacatgttaaaatgctgggaagcatggtgacattcaaggaaacctgttctctgcaaacacctacccaccggcacaggagacaccccagctatgccaagggctttgtcttcctctggagtaagagcctgggaacaatcaggtggcccctgaaaggggtgccgcgtcttctgctctgcatggctgagttaattggggaactcccagagaacattccagaaaacagtcaacctgtctgtgctgggtgcattgagcatgacccaggatcaatggaagagacagaagcttaatttccttatggctgcaaggtgagcactgggaggacggctgaggcaggttagccaccgcccctgagtggcttcagccccaggcaaacagggacaggtgaagggcctatctgagcgcacctgtatctaaccagtcccagcatcagcaactgcatcctgtggaccacgagggggtgtgtgtgcccagcccctcacagatcacctgagcataaacaggaaattctccaccttacacccgactgcacaacacatctgcctccagctcttcatttacaaggtgatatcacatcagacagggactgatctgggtcccagatccctcaggtttccgctatcctttccagtccccacacagagcagactcttcactgcagggtgttgagccagctcttcccctcacaatgcctgttacaggtttacaagttactgttctccaatatgattggggtttgtttcactgtttctctatatatatatatttgcattttcttgggtaagctgagccccttgtacctggtcttgagtcaggcaggggccacacagagaagaggacttcctcccctggcaccagccgtccacagatcagggcatcaaggacctgagcagcaggttctgaatccacacctagaccccggaagtccctgagctcccagccgacagtgtggagcagccaccagggggaagcagagaatcaactggcaaagcgacctggggatggggcaggcctgggtgatagggagatgctgacatgcagtaagagccagtgaccaccacctcagatttagagggaaagggtctttattgtcctagagtattgtccttgacactgatgtaaaaattctagaatcacattttgtcttcagctcttttgcatgctgactctttgtctgacacagatccaggcacttgacttctcacaacgccccctcctccacacccagttgtgctaaaactgcatccccctcatgtgcagtgtcctctctgaggtcacaggtatccccctactcccatttgatctgggaacccctgtcctgcagacatagtggctggcttctaacttcctagctgcccctccacatccaccgtccctggtctttcccgactctctcctggggaagctgccaaatcacagctcttgatttcctggtgagtcacaaaatagttgctcattaacctttagttgacttaagttcttatccattgatacattttccccagcaactggagacatcatatttataataaacattcacttctggggatcttggagtttgcagccccctctcattctctcatggagcaaacatttccttcacctcctcatctgtccctggtcctgacagcatcctggagatactgaggcacagcagcaatgacctacctagaagctcacagccaaggcagaaacttccagcatctcatggatcttccaacactctgtgcgcacttggcaaataaggaatttcattgacctctatcactcagaggttgtgggctgtggtgggacccgcacctgtccaaggtgtgcattatcacctgtacagtggagacgaagagggaacttgcattgggttctggaaagtactgtctaaaaatagatttagacctacaccagaaatgtcctctctaacataaaatatttatgataggacacattagaggcctagaccaaaatgaaatacctccctccagagccaagatagaatggaggaggggactggggaccccagataattccacagttaccagcatgactctatggtcacctcccagaccaggtcaaaacccatcccataggagggacttcatattcctttgtaaatacagacaaagtcacctctgagctctgctgtgaccaagggagcccaggagtgaggctgagcacagtgtgatgtggggatgtgtgcagagaatatggaatcaattcataaaggagatcctgtgggcaaagggtgggagggcaaggtcacccctaacctctttgggtcccttggggctgtgcccttctcgaaatcacaaggctcctccagcagcagcccctgactctgctgattggcatcatggacccttctctccaacaaggggttgagagacctgggaggagcctgcccagcctcagacttgagaagcagcattggaggcacttcagccatggcctggcccctcttttccttggtctcctgactcactgcacaggtgctgcccccagggtctcacccacctgcccagccccaggcctccaggttcagcctggccgtcagtctgagctcagcagggccctgtgtgtggtgggcaggatgctcgtgaccctgctgcagggggaggggctggttggggtgaaatgcccccactctgtgctcctgtgctcataggtgccctgagagctcttttattcctggggctcactccagccctggcaagtagccagatatccttgggttgagaccctcagtttcaagttttttctgtccccttttctttccttgtaggctctgtcacctatgagctgacacagtcaccctcagcgtcagtggccccaggacagatgaccaggatcacctgtggggaaagcagtattggaagtaaaagtgctcaatggtaccagcagaagccagccaggcccgtgtgtgggtcatctatggggatagcgggcggccttcagggatctctgagagattctctggctccaacttggggaacgtggccaccctgaccatcaacaggacccagggtggggacaaggctattactgtaagatgtgggacattagcactcctcatcccacagtgacacagggagatgaaggagcaaaacacaaaaacctcttccattggtgtcactcttgtcctccagcccaggaagacagtggacaaagccatgagtgtgtgttgcccagttaacctggatgtgagacccccaggctgccctttccacaggccctccaggcaggctctgcagagggggcatcaagagtgaatttagggctgagatgaccaggatatattgaggtgtggaggaatcagttgtgatttggggaagtggggcctggttggaagatcagaccaaggtcgacatgcttagttgggctctggatttccatagggggtgaaggctagtccttgggctgaatatcctgagtcagtttccagaactgcccagctcacgttcccgtggcatcctgccattctcttcaggaaaaccagtggagtggacactgtgggatccacccatattccctcttctgagctcacccacccagcactgctggtagctctggcagctcagagctgtgccctcactgagaagggctgtcagcagagaaaactgtctcctccaggtttatgccccttcttagcaaggtgtggtttcataactgcctgaggtgaagctctcaagactccctttcaatatgggagaaacagaaaatcctcccagcttcacagctccttattgggatggtagaagactcaatgtgggtcagagtgtccttgtgcccggtgttgcctccctcacttagtttcacacctactgtgaaagcaaagctccatctcagagtctgcttccaggcatcccaaaataacataaccagtcatcccgaacgtgagccatcaggaacctcaggaggccacagtataccagaaagcaccagtttattcctaatgatcattgtgagtttgcaaatgcccaatgagatctgagtgtttcttgcatttgtatggaatgaaaagggccctggcatgccaggcactgtggggtctgagggagagttggagtcagatctccctgcagggaaacctggggcaggaggagcagcctcatcccatgcagggaccacagatgcacctgcagggtgagctgcaggatggacactgcccacctccaccctccacattctgtgcaaaaaatcattctttccacccctccttcagcctatcaaagttgacacttaaaaagccaccacagcccacccttgtcaacaggaaacccattcacatctccatcagccacacaatctccacataaagattcttcaaaaaataataacacttgccatgcaaagtatatatataagatgtctcaaataattgtacttagattgcatatgaaagtgatactattttgatatgctaggtaaataaagtaaattatttaactcatttacttcttccctttgtatttttaatgcgatgactagacattcagatttccatgaggctcacatcatattgtgaatgaacagtgctggtctgcaccccttcaggttacagtggctgaggagtgacctggtgcaggaagccccatctccatccataggacattggtgtgaacccagggagaggcgctggtgtaagagagatgagaacacaggtgtgaaccacctgcttgtgcaggggactgagccttcactttgagccaaacaagcttcttttcctatcttcaatcctgagcaagaggactttccggacttctttttgttttcaggtttgtgcccctccaggcctgaggctgtctggatcccagccaggggacacagaggaaatccagaagtctcacaccgaccctgttgtatttcatctgctggggccatcccaaactgctgcgtaccatttcctttcctggtgctcaaatagctgctctatgcacttgtcatggtttcagagatgactctaggtgggaagacaggataatgtatgttattatatttaaaaggaacttaaattcattaatatttattttaatatgaatcattaaaaaaatttgtcataggcaatggggaaggaggaaaagatattaaaattattttgaggaaaaaaccaaaattgtatttctcgaatgtctgagtgtcttcagtgtctcagggttgacagcggtcagctttaggttgtcctgaggatgtactccattgggggaaagcaagaaagcatgaaacacacatctctgtgacctgacacataaatcacagtaaaatggaagtaaatcttttaataaatcaaacactcacaataaatatcactctggtgaacacagaaatgcctgttaacaaactttccctttcccctgctggctcatatccccatggatcacctgtgtgcagagtggactctgtggtccccatttctcaggctgagaaccagaggctgggaaggacaagtcacctgcttgtgagtggcaggggaaggattgggagcagtggactcggtctcaggactgcggccctcaggaccaatgccacctagcagaggtttccacggggcgggctgccccatttcctgacagtagggacaacctggaggtgggtgccaagcagagggcactgcagggtgtgcccaggcctggagggtcacagagacacaggcaccacacagcagagacactgagggccagaagatcactcaggtaagggacttcagcagatctttctcctgagcaaatcaggtacaaaaaaattaagatcctgccatcagaatagataaacaaggactttaatctcagctgagctccactatccaaggaagcagaagcctctgagcccaggcccaggtgagggtggggtgaagggaggagctcaaggtggagatttgcatgcaggccccaccctcctctttggcagaggagataagacagggctgggggcaggcccagtgctggggtctcaggaggcagcgctctcaggacatctccaccatggcctgggctctgctgctcctcaccctcctcactcagggcacaggtgacgcctccagggaaggggcttcagggacctctgggctgatccttggtctcctgctcctcaggctcaccggggcccagcactgactcactggcatgtgtttctccctctttccagggtcctgggcccagtctgccctgactcagcctgcctccgtgtctgggtctcctggacagtcgatcaccatctcctgcactggaaccagcagtgacgttggtggttataactatgtctcctggtaccaacagcacccaggcaaagcccccaaactcatgatttatgaggtcagtaatcggccctcaggggtttctaatcgcttctctggctccaagtctggcaacacggcctccctgaccatctctgggctccaggctgaggacgaggctgattattactgcagctcatatacaagcagcagcactctccacagtggtccaagttcctggggaactgagaccaaaacctgccctgggctctcaggccccctccttgctctgaagatgcttcctcacccagtgcaagcggcttcctgcagtgcggccttgagaattcttctctctcagctccttccctttccaccatgaattccaaaaggaaacccgctctgtggtttctcatccaggacagggacagcttcctgatgcttgtgtgccgtggtccctgaatgtgcaactcttgttagctcttcaaatgcagggacagtgacaaggagcttcctgattgatgcagtcactgcttttttcagggatgtcttcaccctacatgcatcaccatctcccacactgtgggtagaattttagcaactacattctgatggttatcgccacaactttgatcttaaataacaatgcagcgaacatccctgtgcagcctcctttgagttcctgtgtgaatatgaccacaggattcatttctaaaagtgaaattgagggtcagaaagatgtgtgtgtgtaattttcacccgttgttgtcagattcccctccagagggattctaccaattttcaatgccagccggaagtacttgttcagagtacattgttgaaagtggaagtttttgccaacctgtcagactcaaaaatgatacctgttatggttttatttttgagtctcctgttctgcttaagtttgggccttttcagaaatagttcagtactttttcttttttaggatttgggaaactttttcttaaatatccagataagaagaattttaatcttcgtggccggacaccgtggctcacgcctgtaatcccaagtgtgttggaagggtaggatgggtcaattgcttgctcccaggagttgagattagtccgggccacacagtgaactctcatctctattaaattaaagaacataaaaataaattttaaaaggaagtattttagtctttgtggctcaagaatcaactttggggatattccataggtatgtatagcatcatttacaatgtaaccatttaaaatgataaaagccactgtcagctctaggccatacaaaaacaggtgtcaggccagggatggccacaggatgtggttgaacagtccctggtttgtagggttatctgagggttgaaaattccaccagaatatgatctaggtgggaatctctctgtgagggtcactgtatttcacctcctgtattagcctgaggtctttcattggataagaacatgctcacatcatctatttgattgtatcatgggtttaagacaaccccgtgtcacaatcacataacatttatctgcattgcttgctccgagttttgggagagctttaatttatcaggaatagactcctcctaaggcaaaagtctgagagagagggatgggcatgtgggcaagatagtttgtaccaaagctggaatatccagggcaggctcagagagaaggttactaatatcagcatttgactgcagccaaaaacagaagagaacatggaggttctgagaatgacaaataaacaaatagtttaagttttaaatgtattgaatgtttttataatccatgaaaattctagaacagaatttaacaatgggataaggaagagagcttgagatgttaaaactataaagaccccaagccaagctgccaggaaaagaacaggatctttttggtggaaatatgtttctgctgcaaattattattttatgtgtgtgtgtgtgtgtgtgtgtgtgtgtgtgtgtgtgtgtgtgtgtgtgtaaggaaacctcccatggaacatccttcttccctacagtcaagatcaccctcaccctacaagggaacctaaacaaaatgtcaatatcaaatagaaaaaaataatgcactttgtataaccattagagagtctctatttgcacatcaaaatgtggatgcttaacgttaacattggaaatagtattttaatatgcatatgagatgaattttctttagactatttttgtgaattatctttcttaataaggacatactcttctcttagaacaatttaacttgtgatattttttctattttctgtatcagttctgttttttctaaacactggcaaagatatcctatggctactgattaataaattagattaatgtgtatttaacttaggtaagttagttcaagagtggacagatgtgatttccccacatatcctatggctactgattaataaattcaattaatgggtatttaacttaggtaagttagttcaagagtggacagatgtgatttccccacatatcctatggctactgattaataaattcaattaatgggtatttaacttaggtaagttagttcaagagtggacagatgtgatttctccacatatacctcacagatgttgctggtgcttactcactcttctcttctaatcttagcaaataaagtgggaaatttgacattcctaaacacccagatgacaacaggagagaggaggtgaagccccaaagctgttattctttaaatcctcaggatgaatcaccctggagaatcacccacacttcagttggatgatacgcaaatgagagtttggtcttagagtggtgctgagttagttcaggatttgggtcactgggatggggtgaatgtgttttacaagtgaaaaatacatgagttttggggtctgcagggtagagagttcttggctgaattgtgtcccccagatctgggttgagtgacatcccaccaagaggagtccaggagaagtaaatttgtgtaaacaccaaacatgcactgccccactaggcctgagaggaaataagcgaggcctgggaagcccacctgtgctttgggttcaggaggcagagctctgggtgtcttaccatggcctggaccccctctctgcctctccttcctcaccctctacaaaggtgatgcccccaaccctgccttaggctcagcccttacaggatcctgagctggtcctgccctgaaccctgagctcagcctaggcatagcctcagggtgacaccactggaaatgtgtttgttatcttcaagccccctctcctttcctctcctgcaggctctgtggcctcctatgagctgacacagccacccgcggtgtcagtgtccccaggacagacagccaggatcagctgctctggagatgtactgagggataattatgctgactggtacccgcaaaagccaggccaggcccctgtgctggtgatatataaagatggtgagcggccctctggaatccctgagcgattctctgggtccacctcagggaacacaaccgccctgaccattagcagggtcctgaccaaaggcggggctgactattactgtttttctggtgattagaacaatctcacagtgacacaggcagatggggaagtgagacacaaatccatttttcatctgtctcatcttttcctccagcaccaggatgactgtgggccaagccatgagcaggtctggccaagttctactggatatgagacctccaggccatccttttgttcagccctacaggttggtgctgcagagggtagagcaggagtggatttagggctgctataatcagaattttcttgtgttttcaggcccctgaagtgacttggggaaataagaacgggatggaagatgagagagatgtagagaacaatcacttggccttagatttccatacgatggtgattgggtcactccttccaaatatcttacatcagtccccaaaaatgcccagctcagctcaacacctgagcttccaggcttccatggcagcctgggattttgaacaggaaaagcagaggaacaggaaaagcactgtggcatctgcctagatatgcttttctgagctcacccaccctcaactgctgggagcttctagaagcttagagctgtgccctcacaggaaagtgctattgtttccagaaaacttcctttctcatatttaggctcagttttgagagttttggtttgatgactgcctgagccaagaacccaaggccccgccttaatacaggatgacactgaaaggccttccagctccagacctcccattgtggatgcctgaggcctcagttgcaatcttatgatgggtcagggtctccttctggtgggtgatgcttctctcactcctttcagattctctgtgcatgaaaatgtttatctcaaagtctactttcagggaacccaaactaagacggccagctgtcaccaaaatgagccaccatagacctgaggtggccactataccctggaatgcatcagcgaatttcctaaatttccactgtgagcatccaaatgcccaacgatttctgagagatccttgtattcttataaaatgaaaagggatcctgaaatgccaggtgctctgagtcctgaaggagaggtggaggcagatcttcctgcaaggattccacggaaaagggagcagcctcactccatgcagggaccagagatgctcccacgggggcagctgtaggatggatgctgcccacctccatcctgcacatcctgcacaaacaatcactctttcacccctccttcagcttatcaaagttgacacttacgaagccagcacagctcatccttgtcagactccttcaaacctccatcaaccacacaatctcaacataaagaatctccccaaaataataatagtaacaaaataataataataataaaataatagtaacaaaatagtaatagtaatagtaatagattttcaggcacagaaatagtaatatagtagctatgaaaacttctataaaaatctcataaataattttagattgtgtgcatgtgtaaatattatttttcacactttgtgttaaataaagtatattattgaacctagtttacctttttattttttatgtctactatggtgactagacaataggattcacatgagactcacatcatgttgtgattgtacaatgctgatctggtcttaccccttcacatgacaggtgctttggagtaacctgcttcagcaagccccatctccacccataggacatatgtgtgaagccacggagaggcactggtggaagagaaataagaatatgggtgtggaccagctgtttatgcaggtgactgagtgctggagccctgaccctgctctaacctagatgtgtcacatccatctcaccagagaccactcctggcctgcctgagctcacaactggggggaaatcgcatttctggcaacatggtcacttgatgtccagtgttatcctgtctctcccagggcccagtaagacaaaagaagctgtttttagaaaggggagtaacactctactgcacatgacatggccttcttccaaaaacccaggagtctacattgggattctccaacggggtttgccatgtgcaggaggttttatttcccatggtggagtctgctggattctctggccccaacagcaggacactcacaaccctgcctgcacctgctgcagagccttcctgctctgggcctggaaaacaatgggtgacatttatggctcctgatacatggattggagtcacatccccagtagtaaaatatgctactcctagatcttataggccttgtgtctctttcttcctggggaaaattgaaggttataataacatcttttttttttttttttttttttaagatggagtctcgctctgtagcccaggctggagtgcagtggcccgatcttggctcactgcaagctccacctcccagattcacaccgttctcctgcctcagcctccctagtagctgggactacaggcacgcgccaccgcacccggctaatttttttgtatttttttattttagtagagatgagttttcaccgtgttagccaggatggtctcaatctcctgacctcgtgatctgcccgcttcggcctcccaaagtgctgggattacaggtgtgagccaccgcgctcggccataacgtgttgtttattttgtaggagactctcagctgctccagacaactaaagtcccaatttcagctaatatggaggaggaaacatctttgtttatttcccactctcaaaagtgcatggatctcacaaaagcttccaataggccgtgcccatcatgtacatgtgattgaactatgatatccagatggtctgagcccccatgatgatatcatgatagggaagggagagctaatgaagctgggcagaaaaagtgtgaatgtatactgttgtccattccacgtgaatgcacactgattctgatcctattctctgaggacaatagacaagacctcagtatctgcttcagtggtttaactgtgcacctgcagccatagcattctgttccaggagatccccatctggcacagatattgctaatgccactattgcccatctgggtctgtacaaatccaaattcatcttccaggatcattcaactattgtagagatcagtccagtaaactgaaagtgaggaccccagaagtaatcacacgtactgcaggagaggagagagctgtttcagaggccacaatcctgttgaaattcctctgctccttgggaagaaacagcccagaaaaggccccaggggctgcgtctcatctgggttcctggatgaggcacaccccctactgcactgagattccacagaagctgggggtgaagtgcaaacaccgtctttggttcatccttgggattttctttttatcacacactcgtcattttgtccacaatgtccaaagtttctaaagtgctgtctaatagatagaggttctttgtgcgctgaactaaaagctcttgggttggctaatggtgatgtttgcacatttttactgtacttactgccgcttaattacacacttaaaaatgattaaaaggatgaaacattttgttatgtttattttaccataataaaaatattgcatgctcaggaagcaaagtaatactagtttaattttgaaatcacacaactggtaaaaatggaaagaaaagcaccattttctctgttctatatgctacaactcaactttctctctctctctctttctctaattaacaatgatatcctgtctggtccaaggtcacacatttccagtgttgcaggaatgtctgttgaatctgctaatttgttgccaggaagaatactcaaacttctcatgctcatatttgattgtcaactgtctccagccaacatttctaaaccaggatcctttgacaagacttgtgaagaattttgtaaaaagtaccccccaagatgacagtgttcgctgttggcagcaggactgtttccacgcagtagggctatgctgggtgtgcagtggagctgtgcacactgtgctcacggggcagattctgtgctgctgactctgatccctgtgcttgggaggaccgtgtccactgctgagtctacatctgaatttgattctcaagaaaaaggtcattcatagctgctggacactgagtcacacagagagacagaaggtggctgaggacaccttatctctgatgagaataaggggattagatctgctggtggaacaggaagctgaagaaacttctggctctaaacatggaatttccagccctctgtctctgctgtccatgcccttctcatctgtatgttcctgggagatgtggaccacgggggtcagaggtgaaggggattgggaagctttcatgttctctctcaccatctcccttgtttatctaacacactcttacacacctactttattagagcttctgctctacaaacatggctgagctctaaattagagacttttgaaagtgcagacggatgcaggaactcgtccatctggagactttccaccacttgaagcagtgaacacatctctgcaaggctccaaatttcaagtgacaggattttgggatttcaaagaaaactaaatctttggtgaaccacgacagaagagggaaggttcacacatttccctgctgcttgggcctcagtgaggactgactcagccagtctcaggctcctggaaacctcctaggagatgtgcactaggaaagtcttttcagtacaacctggggcaggtaagtggcccttactctgatattctgctccctgataattttgctttcagagaagaacaaagacctgtgattctgggaagttcaaagcccccagacaaggtcttctcattctcccgtgacagcctgagctctgcattcccaaaaggaggagcatcttcccggcatgaagagccaggagtagagagggagcttctcccaggggtgagcagggcagaagccaccttggtcagtgggaaggaaacgtgctcagctcacatctgacccagaatgactcagtcacacccgtgcagggtcacctgcatgtgagcatcatctatttgctccatgagaaaataccttgtgtgactcttgggtaaaatcataccgtaggtgacatttctctggctattgcttcagccaatgtttttcaaaattcactgtaggacacttacataaggtaagcatgtcaggtgtgggatgtgttgaataggaaaagcacaggcttcctgtatcaatgttcatggcttgtattcatggccataactcgtggaaatggaaaaaaaaaaaaaacagaaaagaaaatgataccctgctcaaaaaagcactgagaaataccattgtagtaatatatcttcaacttataagttgagctaattgaacattaacttagatagatcatttttatggggggattcctaaacctaaaacattgtattaaaaattttgtcaggttaaaagatcattaaaaggccaatgtttgattaaaatctggagtcttttactttgggctgcaatcagccaatgagtgcatggagttggctgccctcccagaccctgactggctccacgtcgaggtagagcagcgctcccgacaggcagctggaggaactgacgaggggaagctgtttgcatcagggcctcaaaaatttggctcaggattttcccacgtcccctccccaagcccaagctggtcccaggacactcagaagagctcatcattatgggtctaaaacttctctgatctcgctcttctttcttccttccccagagaccttggaattgtcagtccctctcacaggcccttcctttccttgtcaagtgcactccctgaattatctgctcctgggtcagcaattctctagaacttcagggaaagcagtgctgggtcacccacatggggccccagaaagctggctaaggaccagacacacaggcagcaggctaggtccccacagggctgcatggttggcatcgggtagaggggagggaccaggaaccactcgctgagtgtccgtagggccaggtgaactagggaagggctggaacctggtcaaagaattgtgtactaagcaccactttctctgttctatatgctacaactcaactttctctctctctctcttctctaattaacaatgatatcctgtctggtccaaggtcacacatttccagtgttgcaggaatgtctgttgaatctgctaatttgttgctgggaagaatactcaaatttctcatgctcatatttgattgtcaactgtctccagccagcatttctaaaccaggatcctttgacaagacttgtgaagaattttgtaaaaagtagcccccaggatgtcagtgttcactgttggcagcaggactgtttccacgcagtagggctactgcaagccacacctgtccccacacagtagcatcttcctggaggtcaagagtgattttgtttgctatgctgccccagatcacctaatttattacctgtgaatttcacacactacacatcctgcctgtccccaaattcttcacttatgggcaaatgtcacatctgacctgaactggtttacatcccagatccccttcaggcttcccactgtcctttcagatcctcacacacccaagacccttctccgcagggcacagacacagctccctgcacacgcttccatcacttgtctcttcactccttcctcaaaggaactccacagactcttcttcagggaggccttctccaatcactgaagctacagcagccagccagtcagcttctgtcagaactttcaatgattagctgcatagagcttacaattacacatttgttttttctatcgttatcttttgactgatttatttctattaatcattgcattatcagtcagaaatgctttttcactacaagaacacatgtggcaggaaccagggagcttccaattttcttccacaaaaataagtctgcacgtgcttggtggttgttttccagatgctctccagttccataggaagctcaaatatttctacctctccattccctttcaatgagatgttgactttgttttcattgttgttgatgtaagacctcagcatggctgctgcagctccagctatcacacccaagttcaagagaaaaagcaaagcacaaacccaatctagtccttccttcataagaggaaaagtttcctgagaagaatctcagccatctgactcttacatcctatggaccaacgctgggctacatggtcactgctggctagaagaaactggaaatttgcctgactttcaagtgaatagaggggatgacacacaagtagaaggtggtagggagtatctgctgggtctgtaaacccaatctgcctactgcactgatccagcaacaggacaggaaactcctcagagcaaggactgtgtcttcctcatgctgaattcctaaaatgcattcttgccaggacagagtgggtcagggtgaatatttgttgggtgaatgagcttctgtctctgttgtattgcaggagtcaccaccagtgcacattggccctgtatttgtatccagaaccaatcaaagccacccctgagtcctgcatctctcagtaccaagctccagtcccccttcaagaccacccaccacacagacgtgcagggagcctcaggagggcactgtcacctccttctccacatgtgagtgtttgtatttccatcaggaatctgagcacctcgtgcccaggtttgaggcaggaaggggccacaaacagaagagaaatttcttctctgaagtcaacagtccatgaatcaaggaatcagggacctgagcagcagattctgaagctacacctgaacccaggaggcccctgagcctccagctgacagtgtagagtggccacctgggggcagcagagagtaacctggcaaaaatccctggaaagggggtggagctgggcatcagggagatgctgacatgcagggagggtcagtgaccatgacctgagacctggagggaaagaggttcctcttttcttagaatatttgtcattgacactgatgtttaaattcttctgacctcctgtctctcagatttgactcttggaaatggtgcttatttttctgatacagattcagacaatttgcctcttctcattgccctggcccccatctcactgtcacacatgccattccattctgtagtcacgcgtgtcccacctccctgcccttttctctggtagctcgtcctgcagacacaggggcttctccttccctggccactcctccacgtccactgtccccagtctttcccaacactgtcctggggaacctgccaaatcacagctcttgatttccttatgaggcacaaaatacttgctccttaatcttttgttgacttaagtttttatccattgatatattttcccagcaagtgaagacaacttagttataataaacattcacctccagggtcttggagtttgcagccccctctcattctctcacaaagccaacatttccttcacctcctgatgtgtccctggccctgacagcaccctggggatactgaggcacagcacctatgacctggcattagaactcacagccaagtagaaacttatcacatcccatggatcttccaaaactctgtgtgcacttggcaaccaagaattgcattctcctctagcactgaggggctgtgccctggggtggggcctgtactggtgcaaggcttgtgctgtcccctgtagagtgggaagtaaaaggtccctgcattgggttctggattgtgtcttcaaaatgaatttaggcctataccaaacatctcatgtctgacataaaatatttatgaccaggacatttctagagaagcagaagaaagttaaccacctccctcctgagccaggatggaatggaggaggggactgtggaccccagataattcccccatcaccactgtgactctggtaacctcttgaacagggccaaccactatcccataggaaggactttatatcccctagaaaatacagagaaactcagctctgagtttttccatgaccaactcagcccaggggcaaaagtgggcacaatctgggtaaagatgtgaactcagaccatgggaccagtgggtggaggagaatcccatgggctgagggggtgggcaagcagtggtcaccccttttctctctctctctgtgtcccttgggactgagcccttctctggaaaccacaaagctcctccagcagcaacccctgactctgctggtttgcatcatgggctgttctctccagcaaggggataagagaggtctgggaggaacctgcctagcctgggcctcaggaagcagcatcagcagtgcctcagccatggcctggacccctctcctcctcagcctcctcgctcactgcacaggtgctctgcccagggtatcaccaacctgcccatccccagggctctgggtccagtgtggccatgactatgagctcaggagggccctgcctgtggtgggcaggatgctcatgaccctgctgcagggtgagggactggcggagctgaagtcccctcaaactctgctcagaggcttgtgagagcctgaggggctgcacctgccaggagagagtactgggttttcagttcaaaggctccatgcagagggaaagtccatgggccactggggctagggctgattgcaggggataccctgagggttcacagactctctgaagcttttccaggacagcagggcaggggatttcatacggatcttttacctaaaagccatcctctcctttttttttttttttaatctttgcaggctctgcgacctcctatgagctgactcagccacactcagtgtcagtggccacagcacagatggccaggatcacctgtgggggaaacaacattggaagtaaagctgtgcactggtaccagcaaaagccaggccaggaccctgtgctggtcatctatagcgatagcaaccggccctcagggatccctgagcgattctctggctccaacccagggaacaccgccaccctaaccatcagcaggatcgaggctggggatgaggctgactattactgtcaggtgtgggacagtagtagtgatcatcccacggtgacacaggcagatggggaagtgagacaaaaacaccctcccagcctcggtcaccctcttgctccagccccgggaggcctatggatagagccatgagtgaatctggtccagttcacctggatctgagcctcccaggccgcccttccctccagccccctccaggagtctctatagagcatacatcaggcatacacatggcctggaaggaccagaatcatctaatgacttggggctgtcgtgtgagttagagaatgagggcctgggtggaaagacagacagaagcaacctctgtcctctgtcttacccctggatggtaatggggtggggatgaggccagtccttagaccagctatctggctcagtccccagaaccaaccctgctgaggtcctggcccccaggctgtgtggcagtctgtgattcccaacagaccaaaccagaggaggggacactgtgaagtctgcccaggtcccctcttcaatgtgacccacctagcactgctgagaagcccagcagctcagagctgtgcccacaatgggaagcgctgttggttgcagaaagcttcctcaagtttatgtcctttctcagatggttttggtttaatcaaccaagatctcaagtccctgccttaatgtaagatgccactgaatgaagggcctcccagctccagagctccctgtgtggacggacacctgaggcctcagtggcaaccccattatgagtcagggtctccttctgcccactgttgcctccctcactctcttccaaatcttctgtgcatggaaatcattgcagtcaccttccagggaaccccatctaagatggccagctgtccccaacatgggctgtcagcgacccgaggagtccactatccactgaaaattctggtttctgtcctaaattttcagagtacatgttcaaatggccaatctgatggttccttgaatttttatggaatgaaaagggagcctgacatgctctaggttgagagatagttggagtcagatctccctgcagggaaacctggggcaggcagagcatcctcgccccacgcagggaccacagatgcacccacagggtgagctgcaggatggacactgcccatctccgccttccacatcttctccaaatgtcacccctttctacaaccccaacccaaatcattgatctccagaaaaataacagtaacaatagccatgaaaatctatgtaattcatctcataatttcatgttaacatgtgaaaatgatagtattttgctttattgacataaataaaatatactatttatccaattttatttgtcttatatttttatatttaatgtggtgaccagacactaggggtcacaggaggatcgtgtcatactgttatgggacagagctggtcaggactctttcaggtgacaggtgctgttgagtaacctggtgcaggaagccccatctccaccagacccaggtgtgaacccaggaagaggcgctggaacaatggagaggagaacctgcttctgcggaatacagtgcccttgagccctgcccctgctccatcctacgtgtgccacctccatctcaatgtggatcatttcttgccctgcctgaggtcatgactgaggggatctggcaggtctggctgtgtggccactgctgtctcatgtggttctggttgtaacaaagcccaggaacatagaagaggctgttttcaaaaggtaaataataatctactgcacatgacatagacttgttgctaaatcccatgggtctacagtaggattctcctgttgaggtttgccttaagcagaaggtttcagttcctttgtccagttcctctattatgatagggtctgcagtttctctggcccaatagcaggacactcacacccccgcctgcacctgctgcagagcctttctgctcttggccccaaaacaacgggtgacacagttctcagacccatgatttatggtgtcagtattcaggcctcgggggtccctgacggcttctctggctccaagtctggaaacacagcctccatgaccatctctgggttccaggctgaggatgaggctgattattactgcagctcacataggagaggtggcactttccacagtggtccaggttcatggggaattgagacccaaacctgccctgggctctcagcctctctcttgttctgaagatgcttcctcaccctgtgcaagtggcttcttgcagcaccaccttgagaatttcccctctcccagctcctctcctttctcaccaggaagtccaaaaggaaacctgctctgtgatttctcatccaggacagtgacagcttcctgttgcttgtgtgttgtggtccatgaatgtgcaactcttcctagctcttcaaatgcaggcacatagtgagaaaagctgcctgactcatgaagtcattgctgtttttaggggcgccctcaccctaaatgcatcctcatctcccacgctgtgcaggccaatctgcacagaagtcattacagggagtttcaagaaattgcaccttagtcaactctgtgtccactatgctctcgtgaagatggccctcctggctgggctattcctctgtacctctgtcctgaagcagtgaccactgtgagagctgagcatgtttttgagggattaagaaccagaggaagctgttgtttttcattattattattattattattattattattattttgagacagagtctcgctctgtcaccaggctggagtgcagtggcacaatcttggctcaccgtaacttcagcttcccaggttcaagcaattctccctgccttagactcctcagtagctgggattacaggtgcccaccaccatgcctggctaatttttgtatatttggtagaaacggggtttcgtcatgttggccaggctggtcttgaacttctgacctcaggtgatccacccgccttggcctccgaagtggtgggaatacacacgtgcgccaccacacctggctgcgtttttcttatttttgttcctcttctttgcctcaatacctcaggttgctgagctggggagattttgagtgacagactcagtattctctcaaaatccccctctctcacatcgctgaggccctgtcctggaaactctccaaaagtggatggtctccctataggatgggagcttccaaaatggctccacagggaagagttaacctgagttcattccttcctcctcattgacatccagcatttgtaatttccatggccatcaatactactatagctgaaatcttcattaatctactaaaggtgagagtgaatttcatacatattcaaacattagtttcatccaacatttaaattttatgagtcaattggtaaacatagccatgattacatgtagtttaggcttcataaactttgattaaatggattttatttaaaacaatgtaatcattttactatatgtgtatcctacctatatcaacatgttgttacttgaaatatccacaagaaactatatttcaaaaaccaaattgtatttattgtctattgttacataaaaattgctccctaatagttagcatattaagagaacacgtgtttgtgatcttgtcactttggtgcatctggaattgagagcagcttagttttgtggttctggccctgggttggtcatgaagtcgcagccaagctgtcaggccaggctgcattcagaggccagagcaggtggccaggcccagcctgaggggcttccactgtccctaacctgtttggctgattggaaaactcagcggaaaaggagagagtgaagtgtaaggtgcctgtcctggtcccccatgtcaaagaccattccatacatgcaccatttcttattctttcctgcaacatcctaggcatagagcactgcccattcattctaaggctgtagagtattccacagtagaattttagccatgcaacctctaatggttaacaccatgattttgatcttacaaataacactgcagcaagcatccttatgccgactcctttgagttattgtgtgcatatgatcataggataaattttcagaagtggaattactgggtcaaaatgatgtgcatttgtaatgtttacccattgttttcacatgtttcaccagtttacaatgccagccctaaatattgattggaattcattggtgaaagtgcaaatttttgccaacctatcagatataaaaaagttaccttgttacacttttatttttgatttctcctattgtgcttgaagttgagcatttgctcaaatgtttcagtgctcattactttttaaaattcggtaaactttttcttaaatgtataaataagaagtattttagtctttgccacacaggagtcaactttggggatactatgtaggtactgacagcaccatctgcaatgtaaacattaaaatatataaaaaccattttaacccattaaccatccccagataatagctgatttcttattagaagtaatgcaagccagagtcagtggagttatatttagaaaatattaaatgaaaaaacttactacccaaagcaatctacaaactcaatgcaattcctttcaaaataccaatgacattattcacagaaatttaaaaaaacctctaaaattggtataaaaccaagaaagatcctgaatagccaaagcaatactgagcaaaatgaacacagctaaagatgtcacactactagaattaaaatatactacaaactatagtaaccaaaacaggaaggtaggtattggcaatcagacactgagaccaatataacagaatagacaacccagaaataaacccatctatcatatagagccaatcgattttcaacaaagatgccaagaacatacactgagaaaatggcacaattttcaataaatggttctgagaaaactggatatccatgtacggaacaatgaaactagacacttatccccctccatataaaaaatcaactaaaaatggattaaagactcaaatataagacccaggctataaaactactagaaaggaacttagagaacattggggaagaacaattctttaggacattgttctagataaaagttgtatggccaagaggcaacaacaaataatagagatatgggacatcattaaactgaaaagctcctgaaaagcaaaggaaacaatcaacagagtaaagacaatgtgtagaatgagagaaaatatttgcaaactactcacctgacaaggacctaatattcagtataagaaaagttaaaaactgaaataactcatcaacaacaacaaaaaaaactaataataccattaaatagtgggccaagaatttgaatagacttttctcaatagaagacatacaaacggccaacaggcatatgagaaaaatgttcaacatcactaatcagcgagggaattaaaatcaaaaccccagtgagatacaatctcaccctagctggaatggctatgatcaaaaagacaaaaaatacaaatgctgatgaagatatgcgacttcatatttttctagtccaattctctgggaacaatgagagtgctctctttgctctccctttagtaactatttttcacatgcaaaaatatgggccctactgggaaataatgcctaagaccaccaacaccttaactgtttgttcatcacactagaaatgaaactgttttccaaataatattaacatctatctgtgtctatcaccattgtgtcaatgtttgtgtgatcctataaagtttagaaggcctagaagaatgcccttgctttttgcaatacaaaaatggcctaacagatatagatgacatagatatagatatagatatagatgatatagatatagatatagatgatatagatatagatatagatagatagggggttgtatcttggaatttgtttctctaagggacttatttcacatctaatttgaaattattctggttttaaacattatagaatgataacacaattggtgaaccaatcattctgtgttgaggttaacagtatttttttacttcaattctcactgaatgagagcagtttttatacggaggggccatgccataacaatatcacatactggggttgttctcagactgtgaggttctgcctacaccaagccaggatgagaattttatttgtcaaactgctctctccacttgtttgtatcccataatataccccaaaaatgagcataatttcattttttatgctgtttgttcttacatttaatacatgtaccaaaaagttgtctttgtttttaaaataaaattttatgctatcttttaatctatgtccctatagaaaaatcatgatccatacacatttgttatcacagaaagaacaagataaatttcctctctctctcataaatgccatgaccgctgctttttgggattatttttcttaaattattttttaaacagaaattcatataacttaccttaatcaaatttcttttcaaagtaatcacatttcttttatgtgaaaaattatttaccttcttttatcaaaaattatcttaatacaaaatatgtattgttttacttttagaagaaatggaaactatctacacattactaatctaaaaatacatgctctgggtttatatggtgttaacatgtcttccaaattttaaggaataggtatttaaatgtcatgcactttgtttttaaatttagaaaatgtttcaaccttttgcctgggcatggtggctcatgcctagaatccctgcactttgggaggccaaggtgggaagatcacctgagctcaagaccagcctgtgcaatatggcgaaaccccatctctacaaaaaatttcaaaaattggccaggcatggtggcaccacccacaatcccagctactcgagaggctaagatgggaggattgctggagccggagaagttgaggctacagaaggtaaactgttgaggctaaaacatggtaaatatttaattgttcacttaaaagaaatgttggttacattgaaaagaaatttggttaacgtaagttagataaatatctgcttaaaaaataatttaagcgagctgttagcactactgcattccagcctggtcaacagagcaaaatctgttgaaagaaagaaaaagaaggagagaagggaagggaagagggaagggaaaggggaaggggaagaggaagacagaggtggagggggaggggtggaggaggaagagggaaggggagagagagagagaaagagacaaagagagaaagaaagacaaagaaagaaggaaagaaagaaagaaagaaagaaagaaagaaagaaagaaagaaagaaagaagaaagagaaagaaaaagaaagaaggaaggaaggaaaaaaagaaggagaaaagaaagggacagaaaaaggaaggaacgacggggaaagaaagaaaaaaagaaaaaatatttcaagcttttcagtagcagagacacttcgtaatcaataagcaacagaaccaaaacaaaaaaaaaaatctacagaacagtctaaatacaattataaacttctgattcggatatcaaaaccatttcaataataaatatatggtatgaaaacctcacaaaggtcaagtagaatgtattatatttgaaagaaattacgagttgagagtaggaaatttataaatttaatcaaacaaataagcattatgaggaagttgtattgctaatgtattatttggcaagctgttcagtggaacaccaagatattcttaaggaagttgcaaatatctttttttttttttttttttttttgagacggagtctcgctctgtcgccccggctggagcccaccaccacgcccagctaattttttgtatttttagtagaaacagggtttcaccgtgttggccaggatggtctcgatctcctgacctcgtgatccacccgcctcggcctcccaaagtgctgggattacaggcgtgagccaccgtgcccggctgcaaatatcttttaagatgttgtcattgaagtggatttaaaagtgaggacatgaatacctttaaaaaatattcagggataaagagagaaaattaaatttagattgtatacatatataaaatgtattttaaaagatcagcttggctgggcgcggtggctcacgcctgtaatcccagcactttgggaggccgaggggggcgcggatcatgaggtcaggagatcgagaccatcctggccaacatggtgaaaccccgtctccactaaaaatacaaaaattagctgggcatggtggcgggcacctgtaatcccagctactggggagggtgaagcaggagaatcgcttgaacccaggaggcggaggctgcagtgagccgagatcgcaccactgcactccagcctggcaatagagtgagactctatcaaaaaataaaaaataaaaaaataagcttgtctctttttattccttaaataaaaggagcagacacttaaattccttgccttttattttaaaatttagaaaatgcttacagcttcccacagtgaaatttatacttagataatctaatcaatggataataatatcaaaacagaattctttgaccaatctattttcttcatttttaagtctaaatgtatactcaaagaaataaaactatttataattgattctgctgtttgaaaatatttactgatcatttaccttgcaccaactgacctccagctctgaagataggtcagtggtaaagtatacaaagttgcccagcttcgttaaacttaaattctaatgaggaaaaaagaagtaattaatcagggactttaaaacaggagtgttgtgatatggcttggaattctaattgcttcctgtgcttgctgtgtggagactggattgaaaaatagggcgatgataggagcttaaattcatacagaatatggctagcctgtattttgagggcccctgaaataagaatgtatagtagttctcattatttcctcaagaaatctctgcagtagagctttggccttgggagggaagtactatagtcaccaagtggtgagggtgggaaggtgaatttgcaaataccatttggaatgagttcactttaaaggtaaagctggcaggattttcatacatgtcagatctgaaaatctgtgtgtgcgtgtgtgtgtgtgtgatagagagagagaaagagagagaattagaacaagacagatacagacagacaatgacagagctgcagagacagagagaattaaatggggacaccaagaatattgagctgagaaactataaaatgggaggtgccattaaacagaatggggaagagcagttttggggagtgtcagtggctccacgtagacttattaattttgagattcctaaaccacatccaagtggagaagacagacagtattgtgtgtagtctagtgttatggtatcatataaaatatcaggaaatgaatgacacaaaaattagtaagaaagcaaagataagaaagataaaagtcccgagcctagtggttatctactgcctaaaaagtagtaggctgggcatggtggctcaggcctgtaattccagcactttgggaggccaagttgggcagatcacctggggttgggagttcaaggccagcctgaccaacatggagacacctcgtctctactaaaaatacaaaattagccaggcatggtggcgcatgcctgtaatactcaggaggctgaggcaagagaattgcttgaacccaggaggtggaggttgcagtgagtcgagatcgaatcattgctctccagcctgggcaaccagagcaaaacttggtctcaaacaaaaaaaaaaaagaaaagaaaagaaaagaaaagaaaaagaaaattagcaaagatgagaagaaaccagcaaaaagtactaggtataattatcaaaaatgtcaagaggaaagtaggttaagtgttctagaattctatcaaagaaagttttgaaaaaaaagagggagagatcaactgcattaaatgctgctaatacataaattaagcaaaggctgaggaattacgcttcaattcatcatttaacaatatggataccatttgtgctttgataagagcaattttcttggaatgagtaggtgagaaaccatattggagtggtttctcaaaggaatgcctgatctctgggttcttaaggaaactttttattgaacaggggaggcacaaattggattagttttaattccggggtccggacacactctaaacatgtgcctctgcatgcctcgctttttaaagctaggtatcctattatctttcgataacaaaataatcacctgcaaaaccaacacacatttaatggacacacttgtaaagtgtgtactagaggttgttggagaggatgtgattccacgtgatagcttacgagtcactgatgggcaggtaagctggtaaaatatctttggaaaactcaccatacctgttatacttaaatattcagataccaaacagcagaaaatccatattgtaatatatttccatgagaaaaaacaagagctctgtattaaaatattgattattattaaaaataatcccactgggtttcctgacttttttattagcaagtcagtctccgcctgttttcagtagtacaacctctatttaacaaatgttttgtatttttaatcagccacttagaaaaaatattatattttatatcaattctacgttcagtgccaaaaccagtgttttgtacattccacagaattatttgttgaataaataatgaataacttaaataagttatagtatccatatataaataatatatcatctccgaatacagtgataacatttgttatgtagaaaatgatttcaatctcagttaaaaatattttgggcataggagttactgtcatataaagattctcacattgttttgtttatatgaaaatgtttgcagttaacgtacatttttggtacctaaggcttttgctcttgctgccatagcaaacagtgtgcctattaagaacacgaacctgagttttatttcattttaacagatttcttaataaaatatatgccaccttatttggtttaatacataagcaaagagccatccactccaccattgccccttgtccctcctccaatgcagctccttaagatgttactgatagcagaggactttgtgttcaacctaagcactttatagcccttttattttcaactaggtatgaggtaaaataattcagcaccaataaaacaaacactctttaaacaatgaccctttttcttagcctgttcaacaaaacgcagcaagacagagtacacttctctttcccagcaaatcagtgttgccactacattctctacgttctgaaaacttgtattattgactttcttacaaacaccctttgagcttataatttagatgtcatcaaataatgtacaaaaacacgctacttcctcccccttctcttctcttcttaccagactattgtcagtttgcttttctatccaactcctttcttctgtctacttgatttttaaaagactttctacatatttactatcttggtattgtagagaccaactatgtggtcaaactacacatataggaagaactgaattatatgcaagcatttttaaataaacgattcctcctcagttttctgtgattatttcatataatcaaatgtcttccagatacacatcccaaacgagtggttgtcaagctctgctttgttgtctaattttatcagaattatccaaaattcttatgataaatacagatgaattagcataactccagatttatgaaatgaaaatttccagaacccaggaatatgcattgaaaaaatgtattcctcacgtggtgctgatgtgatatgggatctgagtttagaatccaaggaaaattaccctccttgccctctagttggccagaattacctagttgaccagagttgctctcttgttatctagaggtcctcttcccttttcacattctgctctctctccttctgtaccttcctcctctcctccctccacttctgctcatccagatcccaagcccttctccattgattctcctaaaactccaaatggtcagttgccactaaagtccctctgtcccatgaacaagatttgtgggcaaatgtagaatttaagcttggacagagctgaatcagagctgcaattaaagatttccctaaacccagcagggaccagcaaatacttatagaagattagagatttcttgtgagtgcaaagggctcagagtgacctgatgctatagaccaaatcttatggtcccctcaaattcatgtgttaaaatctaattccccatatgatgggatttggaggtgaggccttggaaggtgattagatcatgaaagcagagactgtatgaatgggatcagtgtccctatcaaagggactgctgagagctccctcatctcttctgtcatgtgaggacacagtaaaaagatggcagtctatgaacaaggaaggaagccctcatcagacacgaaacctgctgacgagttgaccttggattttaccatctccagaagcatgagaaatgaatttgtttctctgctacctagtgcagtgcattatcttttggcacccagattggctacagtaccaacatatcaacttgtacacgtaatttttgaaattctgatgccaaatctttgatggcaacaggtgattgatctgctggaggaatggactgacatgatccctctttccacaataaaccagagagtaaaaacaagcaaaagtaggtcaaggtcttctaaaagccgtacctgaaaggtttccagtaacagttgattagatggtaattcaatcacacaaacaaccacggcaaagatacacaactatcagacattttcagaatagcctctaaaacaacatctgacaacattagggagttaaagaaggcacgaactttcaaaaagtcaaactttatttaaatgttattgtagaaacttgtaattttaacactatggatgaattctagggcaggtggtggcatggcatggcgatttgggggcacaagtgctgagttttgaagcttcggttttgataccctttggagatgccccctggcctccacacccctgcccacctgtcaagaagagcctgtcctgggcagcacctcagggacaaacagcccagaagcccagttgagggcagacctccaaggttggaggaagaagccgcctctgggagcaggaggagctgctggatcccctcctcccaggtttcttttcctgccccccagcgcctcttgcaggcaggcaaacaaccccagcaggagcagcagcaggcccttcagccgcagggctgcagctctgctgaatgagagaagcctctctctggcgagtcagaggagcgcaggccatatacccgggtctctacctccatgtctcccactgtgcccaggactgagcccagcgtgggagatgcgggctggggccgtgctggccaccccctctcttccacctcttgctccagccatgctttcagctccagggctgaggccagtggctagagcagatctcatgatgtcaggtagctcctcactgggctggtccttggcaggaccaggacaggggcaggagggatctggagctgctgatagctccagttctgtccctgaaggggggtcttcccctggtgctggcactggctcatcagctggcgctggaatttcctgtgttgctgcacatggaacaggagatgaaaaagaagaaagactcaccaacgtcagtcactttccactggaattttcacacacagaatcaacctcgctgaatgtaaggtattccagcccgaaaacactgcccctgcaaaggctcatagactataggccacctcaccgtgtgcctgtgcctcgatgaactccagaggctccagctggacaagaacaatgtgcagatgtggccgcgatgggatcaccggtggggcctggcctggtagggcctgccctgggctgccctgtggtacttgggggcgcctttgcccaaatggccagaggcgcctggagtgagagatgagtgaggtattgcccctcacaagagggcattagctgcggggatccgcccacagaccctgacccaaatgacggatgaataaaacgtacactgacacagagttattctgctttgccagtcctgctgagtgtcccactgcctgcacaccaagagaggtttgtcactgcagctggccgtgaatagctcgcactgcaggcatttatttagtatagaatttacaacggaagctttgagtaaatactcttgtggataattaacatggttaagagagtagttctaccaatgattaaagctcaggtaccatggtttaaagtaaataccactgggggcaatttcccgggtctacctcccccctcctccccaagaggactatctggctcaaaggctagttaatggaagtagggtaaacagacttaactggggaagcctctattgtccctaacatttaccctatgagctaatgctctaagataagaagcagctgccttcagcctgttcaattattacaagctatgtaacctttccgccttccaaaaggtttgtgactattccctgtaactttccctaatatttccctttaatatttctgccaccatcctgagtgaatcccaatagatgagcctgcgtcagcattgtgggaaaaggctctcgctctgggccctcctgaagcaggagactcgagatgtgggaatgcagcatgagaacatcttgctctcctgagcatctcccaccaagggagctggctgcgggtctgtccctaggatgtgggtgcctgattaccagagttctaagttctgttagagtccatcaccaaggaagtgaagtcacttctttaaggttccgtaccctcggctccttccttcaaaacctactcagaaccccctgggctgctggctgctcaccctccccccaggtcagctccttacctgtacacaggtaagtccacccagtgtctgcttgtacacctgtgcctgatgtgcacctggggcctgggaatccacttagggcctgtgatccaacaggggcctaatgttgattaaaactaattttgattattcctatggagaaggaaaggccttctagcaataagaagcagagttccaaatcaaatacgtaaaaatgatcaaaaccttgtaaaagaaaagtatcttaattttaatcactgaaatgttaactttttgataaatatttaaggttataatgaaaaataaaacaatactaataaaataacagttgcaggaaatgctattgagtttcttgtttgtggtttgaacactgaaaggtcccacctagttatggtcataatttcctaccttaatcttcttgttcttatgagtaatagaaaaaaacacaatgacgatgaatgtgatgatggttcaaatacacaactgaagtttagtggcagaaacatcaggtgctcccaattacagtgcagctgttcttactgaggtgagaaaaaaaatcttgttttcaatacacacgggaagcaggagtgcacgcggatatgaccgcatttctctgaacttatgtttttcacagaagagctacagtttatcctgcattctccgttctgtgatcaaaaaccatggaacagagaagagcatttcaacctgagactcaattataagaattgcgtctgccccacctccctgcaaccatatatgccacctctctgtgctgagcctgaggggttcacatatggcacagactgaggctggactcaacagtccttaccctcgcaggtgacaggcgttctggggtcacttggaggagggaagctcctgggctctgtcttctccaccagcagggggcagcacagctgcagacagaagagaggctgaggctgcccagaaggagcctaagagggaggccagccatgaaggctcaaaaggtgtccaaggatcagtcctcaatttggaagtccagtaaagtgcatcctatcccctcgggctgcagtaactccgtcctgactgtaagactcatgcagcgtcactcagggcactgacaggagcccagggacagtgagagcctcacctgggaaatgtagctggaggcgcctgggccccggtgtcagcctggggagcttccacagggctgggattccctgggagacgccccgaggtcaaggtgctctaggagggggccacagtgtgagaggacagggtttccagggcccaagcccttcacctagtattgctgcctgagcctcctgccactctcatggtcttgtccctctctgatcagcagcattctggggagctgagccctcagtcctgggcacttccagagacctccccccgccaccccttctccctctgcctttccttccagctccaggcatactgtgactcagggggcagctcctgtgctcaggggagtctcacgtgggtggggtggtgcactcaggaccctggctccaggatgtggcatttccagcctccttgaggagatgctctccacagggaaggggattctcacctgcctcaggccagagctctggccacgaggctgtccttggctcagggacaggatacacctcattgcaggaaccaaggaccacccaccctgcagaccccacaccctgtccaaaggctgtgtccctgggatgcttacagcgaccatggggcttaaagttgaatttcccatcaatatttcatgtaaacttgcaaaaagcacaagaaaaccacactgggctgagaactctggtgctattttgctgttttttacaagtttacataaaatattgattggaaaaataaacaatggcagagctgaggatggcaatggctggtctactgtggggatggggatggcctagaagtatcagccccatgggtgaaatgagaccagacgtcctgatgactccacatgggtgagtggttccttaaatgactcaactattctcactgaaatagttaactagtgtcctaatgacacaatccatcatttagatgaaatgaccaggatgggacatttcctccagccaggaagactgtggacaaattcatgaactgggctggcccagttcacctgggtctgagaccccctggatctgagtccctccagccctccaggcaggctctgaagagggggcgtcaagagtggatttagacttaggtgaccaggatgtattggggtttgaggactcagctgtgacttagggaaatggggcctgattgaatcatcagactgaggtagacatccatcagctgggctctggatttccattggtcatgacaagccagtccttggcctgaatatcctggatcagtccccagaactgcccagctcaggctcaagtcattctctacagaaaaaccagtggagtggacactgtaggatctgcccagattctttcttctgagctcacccacccagcactgctgggagcttgtggcagctgagagctgtgcctttcctgggaagtgtggctcagcgcagaaaactgcctcctccaggtttatgcccttcctcagcaagattaggtttcatgactgcctgaggccaagttctcaagactctgcctcaatataggaggaaatgaaaatcctcccagctccacagctccctgtaggaaagactgagacctcaatgtgcgtcagggtctctttccgcccagtgttgcctccctcacatcctctgtgcatgaattcctcatctcagagtctgcttccagggaacccaaattaagatcaccagccatccccaacatgggccatgcggaacctcaggaggccactgcacactggaaagcgcccatttattcctaaattagcactgtgagtatccaaatgcccaatgagatctgagtgtttcttgcatttgtatggaatggaaagggagcctgacttgccaggtgctctgggtctgagggagagttggagtcagatctccctgcagggaaacccgggacaggaggagaagcctcaccccatgcagggaccacagatgcacccacagggtgagctgcaggatggacactgcccacagggtgagctgcaggatggacactgcccacctccaccctccatgccctgtagaaaaaatcattctttccacccctccttcagcctatcaaagttgacacttaaaaagccaccacaccccacccttgtcaacaggaaacccattcacatctccatcagccacacaatctccaagattcttcaaaaaataataacactagctatgcaaagtatatgatatatatcataaataattgtacctagattatatatgaaaatgatactttttgatatgctaggtaaataaaatatattatttaaactcattgacttcttctctttgtatttataatgcgatgactagacagtgggattcccatgaggctcacatcatattgtgattgaacaaggctggtctgcagggcttcaggttacaggggctgtggagtgacctggtgcaggaaaccccgtctccatccataggacatcagtgtgaacccagggagaggcgctggtatgagagatgagaacacaggtgtgaaccacctgcttgtgcaggggactgagccttcactttgagccaaagaagtttcttttcctatcttcaatcctgaacaagagggctttctggacttctttttgttttcagatttgtgccccttcaggtttggggctgtctggagtcccagccagaggacagtgaggaaatccaggagtctcacactgactctgttatatttcatctgctggggccatcccaaactgctgtgtaccatttcctttcctggtgctcaaatagctgctccattcacctgtcatggtttcagagatgaatctaggtgggaagacaggacagtgtatgttataatatttaaatggaagctgattccattaatatttattttaatatgaaacattaaaagaattttgttataggctatagggaaagatgaaaagagattaaaagtattttgaaaaaatgtatttatcgaatgtctgtgtgtcttcagtgttgcagggttgagagaggtcagctttaggttggatgtgctcagatgaggaaaagcaagaaagcaggaaacacgcggctctgtgacctgacacataaatcacagtaaaatggaaataaatctttcaataaatgaaacattcaaaataaacgtcactctggtgcacacagaaaggcctattagcaaactttccctttgtcctgctggctcatatccccatggatcacctgtgtgcagagtggacactgtagtccccatttctcaggctgagaactagaggctgggaaggacaagtcacctgcttgtgagtgggaggggcaggattgggagcagtggactcgggctcaggactgcggccctggtcggtgctctgtgttccctccacaggatccctcccacatgtgcccgtgtggatgtgggtgcactgcctggggtggctgatgtgctccagggattcgatggtgcagatgcttcagcacaaagcttgggggtggggatgggatgaggctgcagctggggagaccagggaccaatgccacccagcagaggtttccacggggtgggcagccccatttcctggcagtagagacagcctggaggtgggtgccaagcagagggcactgcagggtgtgcccaggcctggagggtcacaaagacacaggcaccacacagcagagtcactgaggaccagaagctcactcaggtaagggatttcagcagaactttctctcctgagcaaatcaggtacaaaaaaattaagatcctgccatcagaaaagacaaacaagaactttttatctcctcagctgagccccactgtccagggaagcagaagtctctgagcccagcccaggtgagggtggggtgaggagaggagctcagggtggagatttgcatggaggccccaccctcctctgaggcagaggggataagacagggctgggggcaggcccagtgctggggtctcaggaggcagcactctcgggacgtctccaccatggcctgggctctgctcctcctcagcctcctcactcagggcacaggtgacacctccagggaaagggtcacaggggtctctgggctgatccttggtctcctgctcctcaggctcacctgggcccagcactgactcactagagtgtgtttctccctctttccaggatcctgggctcagtctgccctgactcagcctcgctcagtgtccgggtctcctggacagtcagtcaccatctcctgcactggaaccagcagtgatgttggtggttataactatgtctcctggtaccaacagcacccaggcaaagcccccaaactcatgatttatgatgtcagtaagcggccctcaggggtccctgatcgcttctctggctccaagtctggcaacacggcctccctgaccatctctgggctccaggctgaggatgaggctgattattactgctgctcatatgcaggcagctacactttccacagtggtccaagttcctggggaactgagaccaaaacccaccctgggctctcaggctcccttttgctctgaagatgcttcctcaccctgtgcaaggggcttcctgcagcacggccttgagaattcttctctctcagctcctctcctttcccaccatgaaatccaacaggaaacctgccctgtggtttctcatcccggacagggacagcttcctggtgcttgtgtgctgtggtccctgaatgtgcagctcttcccagctcttcaaatgcagggacagtgacaagcagctgcctgattggtgcagtcactgcttttttttcagagatgtcttcaccctacatgcatcaccatctcccacactgtgggtagaattttagccaaatatggctgggcgcagtggctcacacctgtaatcccagcactttgggaggccaaggctggcagatcatgaggtcaggagatcgagaccatcctggctaatacggtgaaaccccatctctattaaaaatacaaaaaattaaccgggcacggtggcgggcgcctgtagtcccagctacttgggaggctgaggcaggagaatggcatgaacccgggaggcggagcttgcagggagccaagattcgtcactgcactccagcctgggtgacagagcaagactccatctcaaaaaaaaaaaaaaaaaaaagaattttagcaactacattctaatagttatcgccacaactttgatcttaaataacagtgcagtgaacatccctatgcagcctcctttgagttcctgtgtgaatatgaccataggatacatttctaaaactgaaattgcgggtcagaaagatgtgtgtttgtaattttcacccattgttgtcagattcccctccagaggggttctaccaacttacaatgccaaccataagtatttgttcagagtacattgttgaaagtgtaaatttttgccaacctaccagactgaaaaatgttatcttgttacagttttatttttgagtctcccattctgcttaaggttgggccttttcacaaatagttcagtactctttatttttttagtatttggtaaactttttcttgaatatccaaataagaagaattttagtctttgtggcaaggcacagtgggtcatgcctgtaatcccagcagtttggaaggcttagacacgtaaattgcttgagcccaggagttcgagattagcctgggcaacatagtgaaccctcatctctattacattaaagaaaataaacataaattttaaaatgaagtattttagtctttgtggcccacgaatcaactttggggatattacataggtacttacagcaccatttataaagtaaccatttaaaatgataaaaaccactgtcagctctgggccacacaaaaacaggtgtcaggccagttctggcagggtgagggctactatggtgggaaagggaaatggaagccagtagagcttctcctacctagaaaaatagtaaatcaaaaacagtgtcatatccctggagggattgcagagattagtgccaccatcaaggacttgaaagacacagaggtggtgatcagcaccacatccctgttcaactctcccagttggcctgtgcagaagacagatggatcttggagagtgacaatggattatcataagcttaaccaaatggtgacttcaattgcagctgctgtaccagatgtggtttcattgctcaatcaaattaacacatctcctggtagctggtatgcagccattgacttggcaaatgcctttttctccattccggtccattaggcccaccagaagcaatttgccttcaactggcaaagccagcaatatacctttactgtcctacctcagagatttatcaactctccagctttgtgtcataatcttgttttttttttcttttgagacagagtctcgctctgtcaccaggctggagtgcagtggtgcaatctcagctcactgcaacctctgcctcctggattcaagcaattctcctgcctcaacctcctcagtagctggggctacacgcgcgcaccaccacgcccagctaatttttgtaattttagtagagacggggtttcaccatgttggccaggatggtcccaatctcttgacctcgtgatctgaacgcttctgcctcccaaagtgctgggattacagacctgagccaccatgcccagccctttgtgtcataatcttattcaaagagatcttgatcacttttcacttctgcaagatagcacactcgtccattacattgatgacattattggattggattcagtgagcaagaattcacaaacacaatggacttatcggtgagacatttgcatgccagagaatttgaaataaatctgactaaaattcagggaccttctacctcagtaaaatttctacgggccaagtggtgtggggcctgttgagatattccttctaaggtaaaggatacgttcctgcatttggctcctcctacaaccaagaaagaggcgcaacgcctagtgggcctatttggattttggaagcaacacattcctcatttggttgtgttactctggcccatttattgaatgaccctaaaggctgccagttttgagtgggttccagaagaagagaaagctctacaacaggtccaggctgctgtgcaagctgctctgccacttgggccatataacccagcagatccaatggtgcttgaggtgtcagtggcagatagcaatgctgtttggagcctttggcaagctcccataggtgaatcacagtgcggtcctccaggattttggagcaaggccctgccatcctctacagataactactctgcttttgagagacagctgttggcctgttactgggctttggtggtaactgaacattgactatgagtcataaagtcaccatgggacctgaactgcctgtcatgaactgggttctttctgatcaatgtagccataaaatgggtcatgcacagcagcattccatcatcaaatggaagtggtatatacatcatcaggctcgagtaggccctgaaggcacaagaaaattacatgaagaagtggctcaaatgcccatggtctccactcttcccccctgctttctctcccccagcctgcaccgatggcctcatggggagttccctatgatcagctgacagaggaagagaagactagggcctggatcacagatggttctgcaagatatgcaggcaccacctgaaagtggacagctgtagcactaaagcccctttctagaacatccctgaagaacagcggggaagggaaatcttctccgtggacagaactttgagccgtgccactgggtgtgcactttgcatggaaggattttagccaactacattctaaaggttattgccacaactttgatcttaaataacagtgcagcgaacatccctgcatccctgcatggaaggaatgccatttcccataaatcaccaaatcactcagaatgactacgcataagcccttaatatacgccagatgcattggttattgttttacaagcgggacctcaagaagactttcataatacggaataggatgatgcaaagccctatgctcaaggcccgatctttactagaaaactagtattgggaggttacatgttttccccaaacagatctttgaggaatcccgcagatgccaaagacctgctggcctaagagtagacacttattttctcacagttctgaagctggagagccaagataaaggtgtttataggtttggtttcccctgaggcctctctccttggcttgcaggttgctgcctccttgctgtgtcctcacatggtctttcctctgcacactcatttctggtgtctcacttctgcgaatgcaaatttttattagcctgggttaataatttttatatcagcctggcagattctatcactgatttacttgattatcctatttacttgattattaaactccttctctgctgaggtcacccattggtgagcactcgcatgggatacaaatatcttcacagtttttgatcactcagagggatccatccacatagctcttccccaaatttctttgtcatcaattttccaatcatgcttcttccaagtccctgatcatccaaccaaaccattggctacagcctatgaatcagtataaaattgcatatctggacatttctccttccaggcagtgctgagaaaagtggacatccacatgcagaacaatgaaactggacccatctctctccaaataaaaaatcagcccaacaaggattacaaacctaaggataagacctgaagctataaaacaactagaagggaacatagataaaattcttcaggaccttgggatacacaaaaatttttatgactaagacttcaaaagaacagacaacaaaaataaaaatagacaaatgggagtttattcaactaaaatgcttctgcaaagcaaacaacagattgaagacacccttagaatgggagaaagtattcatgtgaataggtcctaatatcctgttcatctgaaaaggcataatatccagtgtaagaatagaggacaaggctctaaaataactgattagcattaaaaaaaaaaaaagtgggcaaaggacctgaatagacttttctctaaagaagacatacaaatggcaaacaggtatgtgaaaaaatgcttaaggtgactaataatcagggaaatgctaactaaaacccaaatgagatatcatctcaccgctgctggaatgactatcatcaaaacataacaaggctaggcgcggtggctcacgcctgtaatcccagcagtttgggaggccgaggcgggcggatcaagtggtcaggagatcgagaccatcctggctaacatggtgaaaccccatctctactaaaaatacaaaaaattagctgggcatggtggtgggcacctgtagtcccagctacttgggaggctgaggcagaagaatggcatgaacccgggaggtggagcttgcagtgagccaagatcgcaccactgcactccagcctgggcgacagagcgagactccgtctcaagaaaaaacctaacaaacacccgtgacgatgaagagaaaatagaagaaaaaatcacatgactgtctcaacagtcagatcaaatgttttctttcaaggaaacatttttgttggttgttttttctagtcttgttagagcatcacgcatgataagatttgtggtacagaagttagaggggatgttgttccatgcaaaatatctgaatatcccatacccaactcttcggttacttactgataaatgctaaaaggttacaattttgtattttcaaatattctggtggccagaaacctcttccttgacaagtctggagtacaggtatctgactccagatgattagaatttaggcaggtattgtgtgagcagtgaggtcacacacaggaaacgttccagtcaaagagaaaaacagacggaggctgaaacacagagatcatatgtctgagaaataaggaaattccatactaatgggagctgagtgagaacaagatatgaaccatctatttctctctgaatatctcattgggatcttgtccctttcccagcataccactcatgtggattttaaaattgtctgctcttaaaacatttcttgcacatcattagagagtccagcactggaatcaagctcagtttgatgagaccagggcagttaagcaccaaacccaggtgttcttagaagggcttgtagaagacaaaggtgtgttgtcaaaagcagagaaagtgagactttccattgtggtttaaaccacagcttctggaatttcattgggcacacaaatcccctgaggattctggttaagatacagctgtgccctcagcacatctgggtatggccccagattctccatgtctagcagcttccaggtgaggctgatgctgctggtcctccaaggacattttgagtggcttagctcctattcaccctcctcacgcaggcacaggtaagactcacctaatgaagaaacctgagaagcacaggtgaactctccctcccctcctggtgtcttagtaccttttgtgttgctataaaggaatacctgaagctggatagtttgtaaagaaaaaaaagggtttattggggtcatgcttctgatggctggaaagatcaagattgggtatctgcgtctagtgagggcctcaggctgtctccactcatgatagaaggtgaagggaagccggtctgtgcagagatcactgggagagagaaagcaagctttttttcctaacaaagctgcagggatgtaattgagtcatattcataaagtgctcaatacagggcgtaacatattcaagtgctccttagtggacagcaattattactgaccttgctcatgaaaattagacctcagatggaggaaaggcagtgccgagggttttagattgttcgaaataagagagattaaaatgatttaaaatagaggcccaggagctgaggcaagcatccccaggtgttctcctgccaactccccccatgtctcagaagctgttttcaggcaagtcagccagggaggaaagtgggggagtttgtagaaccaaggattgcaacttcatccatgaggaggaggtgtagccagccaggtggggagaggctgctaagctcatctgaaggctgttgaaggctttctggccccatggtcctgggccatccctccctgcccagggccgcattcctcagctgacagccacaaccttgagagaggcctgtgagtctgatcagaaatcctgccagggccccgagggggcaggcatggaagggaggtgtctaaggtcacaggagacactatttgctgcctgtggggctgggacaggctccttgagaggaaattcgggcactgtacgggaggaaaacacaggacagggaggcctctccccaaaggattgtgatgatagagaccaaagcatctgcaaagagcccagccctacaggggattctctgaacacagcattcctcggggcgtctgtgttattttgccagggttaccataataaagtagcacagactggatgctcagagaaaagaaatgtcttctccactaatctgtaggtgatgttagaatctgagatcaaggtgttggcagggttggtttcttctgaggctgagcgagggcctgttctgtgcatctccctggcttcaggtgcttctggaaggatgtgctgttccctgaattacagacaaacaccccaatctctgcctccatgttcatatggcattttccctatgtgtgtctctgaccatgtttcctcggttttttgtttgtttgttttttgctgttgttgttttgttttgagatcgaatctcgctctgtcgcccaggctggagtgcagtggcatgaccttggctcactgcaacctctgcctcccaggttcaagtgattctcctgcctcagcctcccaagtagctgggattacagatgcctgccaccaccttcagctaattttcatatttttagtaaagatggggtttcatcaggttggccaggttggtctcgaattcctgacctcaggtgatccacctgcctcagcctcccaaagtgctgggattacaagcctgagccactgcattcagccatttcccccttttataacaacaccgctcctgttggattgggagcccactctacttcagtatgatgtcatgttaacccattacatctgtaaccaccccattcccatataagatcccattttgaggttctggggctgaggacttcaatatcaattcggcgggggggagcctacaatgtaaatttgtaacattgtctctgtcatgggccagctgtcaatattccctgaatatccaggatccacccatgctctctggccatcaccagagtgagcaaatccctgacacatggataagagttgcttccatgggctcccagccaggctggaaattcttgattcatggaatcaagaatctttctccagtgggtggggctaaatgcagctgcctccctgacagtctccctgggacactaggcttatcagcttttctcctaaagctgcaggtcctgactgtcctgagccccagctctgctgtggtctttgcatcttaagatcttattcaactcgcttttgtgcctcagtggactgacttacaggaaaacagtgggagatgcccctgctctctctccccagggtctcctcccctcagtggcacaagacctgccctattgactggcagtccccccatgcccatctcaacctccacactgcccactgtgcacggtcacaggtcacaaactgattgttcactttgggcagatcaccttgacagtttctgcagaactgggtgcttcttcccagaatcaggaatttacaaacaaggccagttctagagatgcaactgggagagtaatgtgcatcacagcgaatctggacaagacaaagtggttttgctgtagttctcctggaacacattctggtgatgtgtccatctcccaggatagtcttagcaagttacatccaatgctgcatcaggacccacaagaaaaggaactggcctgcatgagtggccggcagggtcctgggaggagaccctgagatgcccagtgacaggaggagtggattcttaggttggtaagcgtgtggaggaactgcgagtgatgtgctcagccaggtacaggagcaggcgtattggtgacctgtggcctcatcttatctcagttgtctctttagaccaaactccaggaaatcagcacatagagacttctgtctgtctccgagatcatcgcaggacttcacacgtcttttctatttataatacaacatcatgttgtgattgaattactttcatcacagcctcaacagtcctaggtctgaaaactaatacatatacttagaatattaattaaggaatactttcttgtcaattatgtttattaaattaaaagacttcagtatctagtgttacagctgtcctaattcaacagccttgaccttcttagaaataaaatcctgatcccaaatttttctggggatatgactggcacaaggagccaagcagacatctggatgtcccagtgtcactgctgacatgtgcttttttgttatctgtcatggggtgaacagaggaagtgtccctacctctgtccacagaacccatcaaagacagtgcacctgattaaagaagagagggttgtgatcagaggggtccggggtcctgggatgaggtgggaggaggagactcatgggaagaaaggaagcagggcaggaagaagctgaagttcaggctctgaggtgcatctcctgcatggaatcttgactccactcacttctgtcattgtgtaatctttcaatgttggttctgtcatcagtaaacttgaggagaggttatgccataagcatagggctgaggaagggttattataaatatccagtcatggttgtgcctataaaacactcaccaaagactctgaatatattaaggtctcataagtagttgttttgcataatctagtgatacatggaggatggcattcctcctgtggacagcaggaggcactgtgggtgtatcgtttggggatgctaatagctccaagtcccccagtagagctcacgtgcaaagggtgtgactgatgtttcctttcaggtccagtctttttgagtacaatccactctccactcctgacacccacttggcccttctcctgcctttgagaaatgactaccctgaggccatcagctccagggctcagctatgagctcagacagacacgcttgggaatagagaacagatttggattcaatgctccttccttcttgagcttcaagaagaggataagataggagctggttgtgtccaggctccactgggcagcctcgatcagagctctcggaagtgcctcccaccacggcctgtgtctccttctacctcctgcccttcatattctccacaggttggagcatccagagaattcagggaaaccctttcactgctatttccccccagcactggtcctcagtggcattctttccagttctcctgtgcattcagcatcattcatgaaattatatgtttccaggtctctgtgctctgtctgtgctgacccagcccccgtctgcatctgcctggctgtgagcctcagccaaggtcacctacaccagtgaatagtatcaacagagaccaaggaggtccccctagtgtataatggaggttaagagtaatggcagcgacagcaaggggaacaggatccccagtcacttattgggctccagccctggggctgaatgctacttaattatcttcaacctccaatctgaggatgaggccgagtatcactgtggagagagccacatgtttgatggtgaggatgggtgagccacagtgacacagaccaagaagtgaggccaaaacataccccctccccttcctcttcaaggactgagagtgagaagccctatgtcatctccattgaccctgagaatgttgactctccccctttcaaatttcatcatcccagatgtcctccctcaagacacccttaggcagaggcagatgcaggccatgattgaggccattttgataagtcatcaatctgtttccaccacaccagcctgtggggactacactgggagagaccagaacagcccaggcaggaaaacggccctgagagaggggtcgggctgagatgactgcatccagtgagtgccattgcaccctgcacccctgcctcaggggactgtcatggggctctgcctgaggaggcaacatggatcttgacatgtccccagccatttatgagaactgtagttgtgtgcatcctcattaacactcaatattattgtcagtttttgtttaaagccactctaatagatctgtagcgattcttattaattttttaacttgtattttcttagcaacatcaggctgagcatcttttcaggtgcttgttatctgtatatcttctttggtgaaaagcttaatcaaatcttggtctatttttaaaattcacttttccccatattccccttcatgcagtatttttcaaaaatggtgaataaatgaaagttttgctgacatttaaaaactcacagaattgttcaccaccagactgttgctattagaagggtaaaggatatccctagacagaaggaaagtgatgtcacattgaaatgtgaatttacacaaaaaagtgaaaacatcaggctgggcccagtggctcatgtctgtaatttcagcactttgggagactgaggcaggagtattgcttgagcacaggagtttgaggctgatgtgaggtatgatcataccactgcagtccagcctgggcaacatattaagaatctgtctctattaaaaaaaaaaaaggaaataaaaaaattaaatatcaggtacagtaactacatagatacttgtgaaaacctctgtattatgttaatgccaataaaatacagttcactgatcaaagataaattaataaaatacattgtgatttataatgaaaataaaggcaaattatatgacaaagacagcacaaaatctgtggtgggtgaagaacatgttatcaaggtctcatatgggaatgtgtaacaactgcaggtagattttcataagatctctatatacataaaccttaaagtagtcattaaatcaaaccttttgatcaaaaaagaattagagcgaataagctacattagggttatccacagaaacaaaattggtaagatatatatgtgtgtataacatacatatgtgtatatacacatgcatgtatgtgagcatatcgagagagagagagaaacttaaaagaagaaattggttcataggattgtcctgtctgacaaggataaaaatctcttgggcaggctgaaggctggaaatgcaggtaagagttgatgttgcgtcctgagcctgaattcagcaatacaggacttaagaaatcctcactctttgctctaaacacctaaacactttcttttttttttttttttttttttgtgagacagagtctcactctgtcacccaggctgggttacagtggtgtgatctcagctcactgcaatcgccacctcccagcttcaagtgattcttgtgcctcatcctcccaggtagctgggattacaggtgtgcaccatcacatccacctaatttttgtatttttagtagagaccggctttctccatgatgaccaggctggtctcgaactcctggcctcaagtgatcctcctgcctccttggcctcccaaagtgctgggattacaggtgtgagccaccaggcctggcctgctctatacactttctactcatgaatgaggcccaccgcattgtgatgagtaatctgcttatacaaagtctactgagttaaatgtgagtcacatctggaaaatatcttcacataaacttctatgtttgtactggacaaaatcaacctggaaccacatcctagtcaatgtgccacttaaaattaaccatcacttaagccggcatgaagatagaaaggaaccattttttaaagcaatcaaaaacagagacagagaaagggaaagaaaaacaaggaacatatccatagattgtattttttaagtcactttttgaggttttctgttgttttcctgttttctatttcattgatatttggctcttaactatattaataccttttctctatttaaattgaatttcaatgctctccttttccttagatttatgaggtagaaccttagtttattttagatcttgcttctttccactgccaaacattcaatccaatagatttatttaaaactacttacttatatctattttttaaattttaatacatttgtttttgtgttttaaaagttcagtattttctaattttgttgtgatttttttctttgacttatgaaatatgtagttttatcttctttcatttccaaaaaattgaagatttaccacagttcatcatgtatcaattccatttaattagttaattctgcattaaatcataccttgcatgagcttcatattttcaaatttgttaacatttgttttgtggcctagaataggaagtatcatgaaaaatgttccctgtgtatttgaaatagcaatgtttattctgctgctgtgggtatagttttctacgaattcaattagcctaagttggctaatagttcaaatatatattcttactgtttttttgtgtatttattttgtaggtctgtgagagagagagctattgaaatgaacaacactaattgtagaatttcccattgcttcttttgagagaggaaaatttccagtcatggttcttaatactttattctcctgacaaaaggtcacctatgattttccaacactaatcaaggaaaaaaaaaaggcagagttaaagccacactcatggatgccacgggagcagtgggtgaccacatgatgtccctccactggttcagtagatttagcgagacattatattttggcttttaaaaatcataaatctggctaagacatccatgaacaaatttgaagacatacacattgaataaaatatgaaaattaaaagaaaggtaactgcatacgtaaaacattgctatcacagcacctgactcatgggaaatggataaaaagtattataaattcaattacatttacttacacattaaacaaatatgaatttaaaccagttcactaaactgtctcatatactgtttaggtgatggagatttattggtgcacaaaaaagacaagaatacctgctctcagagtggcatcatggaagatggtggagtacgaagctccagcaaatggtccctcctgtgaaattacttgaagtggcaagagtcatgacattaactctcataaaacaacagaatcttgtcccacatttgcagtattcagggatgtgccgatgaagagagagacataaaataatctctgtcaggtcaatttctggccatggaaataattgaacagaaactgcatggatcactctgacaaggaagctggtccttaccaaaatattttggaaatgtcaccacgcaattgaataacagcacctttcagcaagcaacatcagccaaggcagagaagagagacaatctgatttcgagagtgacaatatcataacatccaaaatacccagatctcaagaaaagtttacaaagcagacaaacataaaagaaagcaagacccactaaaaggaaagaaataaatcaactgaatgcattcctcaggaagcacaggcattgcacgtgctacacaaacacttcaaatgaactgcccgtatatgctcaaaaagcaaaaggactccatggaaacagaactaaaggaaagcagggaaatgatgtttgaacaagcatgaaatatcaataatgacaagttttataaaggaaccaagcagaaatactgaaactgcaaagttcaatagctgaaatcaaaatctcaccagaggagttaagtagtggtgtgagcagacagaagaataatcggtgaacttgaagatacatcattgaaattccacaggatgagcataaatttttttagaaaagaataaatgaacaaagcctaagagacatatgagacaacatcaagcatatcaatattgctttatgggagtttcagaaagagaagaaaaacaggaaaggaaaaataaaatacataaagaaaaatagctcaaaacttctaagtttgatgaaagattagaatctatactttcgaggagctcaataaactccaagcaagttaaactgaagtctgcagtgagacacattctgatcaaagcatcaaaagccaaatacaaaaggaaaagtgtaaatagtaacaaaaggagagttggggtagctaaagcaatttcagacaatataggcttcaagttaaaaatgcttacaagagacaaagaaaggcgttataattgatgaaataaccaactagtcaagaagacagaataattatgcaccaagggatagcacttcaaagtacataaaggaagaccaatttgaaaaaaaaaatatgtagatctataatataacttggagacttcacttctccacttttactgaccacctaggccgggcatggtggctcacgcctgtaatcccagcactttgggaggctgaggcgggtggatcatgaggttaagagatcgagaccatcctggctaacacagtgaaaccccgtctctactaaaaatacaaaaaaaaaaaaattagctgggcatggtggtgggtgcctgtagtcccagctactcgggaggctgaggcaggagaatggcatggacccaggaggtggagcctgcagtgagcagagatcacaccactgcactccagcctgggcaacagagcaagactccatctccaaaaaaaaaaaaaaaaaaaaaaaaaaaaaaagataataagagaagagacacaaataagtaaaatcagaaatttgggacaatagtacaaagcttatggaaatttaaattataatagaagaacacacaagcaattgtatgccaaatcttagaagatatggacaaattcatagtaaacacagattgccaatctgactcaagaaaaaagagaaaaaaatcaacagaaatatagaaaataagggatgtaaatcagcaatggaaacttccgaaaaaagaaaaactcaaaaccagatggcctcactggtaattctgctaaatgtaaaaaggagttgatatcaaccataatcaatctcttcccaaaacagattaagaggaagtacttcccagcacattcgaagaccctagcattagcctgacaccaaaggcaaacaaggatagtattttaaaaaaactaaactaaaggctaatattccttaagaatgagcatgcaaaaatcctcaacaaaataaaagcaaaccaaatccaacgttaagttaaggggaataaaggatttcaaagatggttctacataagaacatgaatcaacgtaatatatattaacagagtgacagaaaaagtgtatgatcatctgagtagatgcagaaaaagtgtttcacaaaattcacattttcctgattaaaaaaaaaacacacactcagcaaactcggaatagaaggaaacttctacaaactaataaaggacctttatctaaagccacagtgtacatcacattaaatggtggaagagtaaaagcttccctactaagatcagggacaaaacaaggactcctgcctccacaactactatttgacattgtacagaagttttagtcaaagctcttaggcaaagaaagaaataataggtatctagaatggaaatgaaggagtaaaatcatccctatttgcacagaacccgattctaaacgtacaatatcccaaagaatacacgcacagaaaaactaacaaagtgaataaacacattgaaccaagtttcaaggtacaggaacaactggacttgccacaacttttctttgttatcctgggcattagttctcttggcctcaattttatctttaaaactgggaggcttatactgcagttgagaaaaagacacaaaaagaacctgttagttaaagatggaataagtgaatctcagagggtggacataggttggtgaggtcctgtccatctctgggggcatttttctggagtgtgggaaagcatgttcccagatgtgttagcaagatactcgcaattttctcaaaacaacagacaaggatagtgtagaaatcctcccaccacaaattgtgaacagtgtgtgatgaaataaaaataacagtcatagaaaaagatggcgatgatgatgataatgacttaagtacacaactaaggtttagtgatagaaacatcaggtgttcccaaattcaatgcagcttttcttataaaatgggggcaccagtcttagttcccatatatttaggaattgagggtccccatgaggtgtcgctgcatttctctgggcttttatgtttatcacagaagagctacagcttaccctgcactctccagcccgcaatcaaaaatcatggaccaaagaacaacatttcagcacaagactccattatgggaattgaatctgcccaccctcccgaaaccatatacacctttctgtgctgacatgagaaaaccacagtggatcacactggctcaaagtgaggctggactcctttgtccccaacctcccagatgacaggtgctgtggggtcacccggaggagaaaagctctcctaggctcagtcttgtccaccagcaaggggcagcagagctgcagccaggagcagccagaggctggggctgcccaggtggagcctaaggggtaggcagccctgggaggtctacaggtgtccaaggttcagtcctaggattggaagtcaggacagtccatcctattgcttctggttacagcgaccatgttctgagggtcagactcaaacagcatcacccaggacaccgacaggagccggggcacaatgagagcctcacctgggaaatgcagccggaggcacctgggcccagatgtcagcctgggcagctcccacagtgctggaattccctggaagatgccccaaggttgaggtgctctaggagggggcccagtgggagaggatggggctcccagggctcaagtccttcacccaggatggccatctgagcatcctgccactctcggggcctcgcccctccctctccagcagtgtcctggggagctgaaccctgtcccaggcacttccagggacgcctgacccctcctccctctgcctctccttccagctcgagactgactctgactcatggggcagctcctgtgcgcaggggagtctcaggtgggtggggcggcacattcagggccccggttcctgggtggggcttcccgggcctcctagaggagatgctctccagagggaagggggttctcacctgattcaggccagagctctgaccacaaggctgtccttggctcagtgacaagagtctgctgcattgcagagaccagggaccacccaccatccagagctcacactctgtgcaaaggctgtgtccctgggatatttgcagagaccaccgggcctaaagttgaatttcccatcaatatttcatgtaaacttgtaaaaagcaccagaaaaacacactggactgagaaccccgatgcttttctggggccttttacaagtttacacaaaatactcataggaaaaaataaataaataatggaagagctgaggatggcaatggctgatctatgtggggatgggggatggcctaaaaggagcggcaccatggctgaaatgagagcagacgtccagatgatgccacaagggtgtgtggttgcgtaaatgaaccacctactcctactgaaataattaacaagtatcctgacgacacagtacgttatttagatgaaatgaccaggatgggactaagtaatgctgggggacccagagaggagggggaatatggtgggttcttggtccacctgctgctgagtcaggtttcatcaatgatctctcagcagggccaaactcagccccaagccaggtttctagaaggcccgcagccctgctgagcctggcccaggacagaccacaggtcagagaggtttgggacagtggtcatatggccagtccccaggaaggtgactgtgatcacaggcctcagaggtcgaggctaattttctgaccaaagacccaactccttcttcagtcacctgtgctgcccccacagctagtttgagtgacatctttcaatgaggagtcccagaggatagaaatttgcatgaacaccaagcacttactgccccatagggcctgggaaggaataagagaggcctggggagcccagctgtgctgtgggctcaggaggcagagctctgggaatctcaccatggcctggacccctctcctgctccccctcctcactttctgcacaggtgcttctcccaggccctgccccaggctcagtgcccatagaccccaagttggccctgccctgaaccctgtgcaaagcccagacacagtcttagggtaggacccctgggaatgggctcttgatcttcaagccccctctcctgttttccttgcagtctctgaggcctcctatgagctgacacagccaccctcggtgtcagtgtccccaggacaaacggccaggatcacctgctctggagatgcattgccaaaaaaatatgcttattggtaccagcagaagtcaggccaggcccctgtgctggtcatctatgaggacagcaaacgaccctccgggatccctgagagattctctggctccagctcagggacaatggccaccttgactatcagtggggcccaggtggaggatgaagctgactactactgttactcaacagacagcagtggtaatcatagcacagtgacactggcagatggggaagtgagacacaaaccccttcttcatctattttaccctctccctccagccccaggaccgctgtggaccaacccataagcaggtctggcagaattcacctggttaggagatccttaagctgcttttccctccactcctctaggcagactttgcaggaatgagtcaggagtggatttgggcctggcagggccagactgccctgtgtttccttgcccacggtttgagttgtgaatggagagtatgagtggaaagacagacacagcgggacatccatgcaggcatgaacagcccagagcgacaggggaaactttcagctctcagttcaatgcagtcattgttttatctcttggaagaagcatttctccagtgcaactaagactctagactcacagagcccgaggttgtgggggaggacattaaattttgctcatggatcactaaggacgtttttgagtggagccactacaatttattcattgattcctggactcatggatcctgactgtgggagaaatagtactgcatattgggcactgctgtacagcgcatgccccatcctcaaagtcattgcccaaccttacatgtttttgccatcctgctgccacagtaactgagtcttcaagcagacactgagccattcatataagccagatgccacattggtgaagatggtaagacacttgaatgccatgaggatgggcccatggttgctgtttatttgctgtgatatgagttccttggtcaaagccccctgtggaataccatcatggtgggtgaagcattctgtagtccagagataaaaggtttggcagaagcactgcagtcaaagaaagcaaatccctgtctatactaagtgtgtattctggcaagagcaaagagctatccctgccatgaaggaacagctttaatgaaattaatatcaaccaggcatcctatagggatcttcctgttggtcttcactgttggcagatggtcactcagcagtagctacagccaggtcagctctagtgagtggtagtccactttgatgagtccatggacagcctccttttctgcaaccatagggcatttgttattgagccaattgggcaatgatggcagtggttggggcagactgccaggtgtccagagagccacccatcctaccaacctgtttagcaaaatcaattccttctcatgtcagacttcacaaaatattcacataggagataaatattctcatgctttctgcttgctcacacatctctccctcagacacagttgtgatcaatattctgattgtatttcctgtgtccctgaacatccttgatcatcttccaagtccctgagtcacagcccatgaactaggaacctctgcccgtctctctttgcagatgacatgaaccaggtacactgctctaagttctgccttaaggagagtgttcctccaccactgctgttcagggaagcccagaggccaggtgggatactagcactgtccacagcagggatggctgcatgtcctgcagaaacctctgtaaccccagtctaagtgcctcctcctaggcagctggtcccagggagcccctcaggaggcccaggctgtaaggtgagaggatggccatggggcaggagttggcccgtgtctatctggccacctcttcatgcaacttatttgtccttgtgacctgatccatcaggtctcaggtacagcccagccatgtgatggggaggccactataaatggccacctcggactgggggtcagataacatccagctcattggcagcttgtgtcccatggtgagctctgtggccacagtcacaaagagcccctgttgaggcccaggagcccccccagtcttcctctaatggagctttctgctcatttagaaaaataacaatggggaggttgctcgcctacctcaggtctagggtcactgggaccacctagaccacatccatgatcttgtctgattattctgattccttgttggcttagctatgcattagtgtaaccaagccacagtgtcttaggcactaaaatgccactacttggcccctgcctaccctggggtcctgtcaaccacatcttggtatccaattcagttttagcaccactaagagaaatctatttttatattgagaacaggaaacattagttatttctattgtggaaattttataagacaatagtgtggaaatgttttaagagacattttacttagagtgaaagaccttccattaaaccactcaataaattgctccataaatggccagcccaaaccctgagttcagaccaggcacagcctcggtgttgggaccttctgggaatgggtctctgtcatcaacccttctctaccctcctgtctgcacagccctgggcctcctacatgcagggacagctcccctcagtgtcggtagccctgggacagatgaccatgatcatatgctctggagataacctcggaataaacacgcattttggaacaagcagaagccaagccagacctcaatgtcggtcctctagtataacatcgaccagccctcagagacctctgcttaatttttaggccacaaactagcgaacatggccaccctgaccatcagcagtgcccaggccagggacaaagctgactattactgtgcctcagattgtgacagtgggggcagctggcagggactcacagtgacaaagacagatggggacttgcaacaaactgtcccacttcagcctgcctctcattcttacctgccctctgagcagctgtaggtcaggcctcagaatcaggtgtcctctctggtcctcacctggtccctgcagggccggagattcgtaacagcttttccatactctcagggcctacatgtgttcaataaaacctgtacgggggaagctcgttgaagctgcaaggaccttttacaggtttgtagaacacatgagaacttcaggaatccatatagtgtcacatggctccatgtgtaattacacgtcacacagggaaggagagagctgtttcacagggtgcaatcctactggaattcgtcttttccttgcgtagaaacagcttagtggaagccgtgtctcctctggtttcctagatgagttgaccccacattgtaatggggcacctgaggcctaaggaggacaggagacccaacccctgtgggccccaggagccttcctgtcctgacatttcacagaaactgcagaggaagtgcaggcccaacctttggttccacctggggactgtcttcagggaacactgacctttcccagtccccaaattcccaggacctgtctgacctgactaggtgtgcctccagctccctgatagcttggattttatctctgggctctgggctgctttctgaggagctcactaagaagtccttggtgccaagtgcaggacttgcccctctgctccatatcccgggtctgcaggcacaggggacaggtcctgctaggtgaggctggcaccctcttccaggagggatctctcatcccaggccctagggacaggttcactgggctttcttttctcacttagaatctcttagtctttttgtttccttctttaagagtacaactgctttttggtgaaatcatgtgtatacatcaaagttaacagactactgtcacaagcgcatatatatacacatcctcttcctagatggggtaaccgtggacactctgccatagtcgtctttttgtttctctctctctaccacaagtgagactattaatagcactcttctatgcagaccataatcatattctccagttgcacaagaacgattcttatagttgctcaatttccttgcctttcaggaccctgaagtttcccatgcccacatttggttgccatgtctctctgatccaacagtattccttggaagccgaggcttatgaaacattttgcaaaaagttccacaagaaaactcaagttccttgtgcacagttggaccatgttcattgtgtgcagtagaacctcgttccagtgttgagtccattttatgttttgaccatcaaagggaagggcattatgacttttggggactgagtcgatggaggaaagatagcagtcgatgatgaccttatgcactgacgtgtatgtggccaatgtctatagatggatttggaacttgaaggagctgttcgttctgcagatggaatttccagtgccgcatctccaccacccagccactagcactcggcaggtgctctgtaagaggaagcccttcactgccaatcagccattacacaggtgaaggtgagtgagacttaatagctattaaccctcaaaacaaactgaggaataaactcaggttcacaaagtgactttgcgggaacagcctgaggaagcaagttaattagtagcagaaggttttgcccagagcaggaggaatcacaggatcactgaggacctagtgataccatggtgtggaggtgctgtgaggcatggtgacattcaagaaaacctgttctctacaaacacctacctacccacaggcacagcagacaccccagctatgccaagggctctgtcttcctctagagtaagagcctggtagcaaacaggtatcctctgaaaggcaggtgccccatcagtcagctctgcacgactgaaacaaaaggaaaattgccagagaactttccagaaaacagtcaacctgcttgtgctggtgcattgatggtgacccaggatcagtggaagtaacagtagcttaatttccccatggctgcatgatggacaccgggagagaagtgtggaggcggattaaccaccactctaagtggcttcagccctaggtaagcaggaacaagtgagggggctgagcccacttgtgtctaatcagtcccagcctcagcgactgcatcctggagaccaacagggagtgtatgcgctcagcccctcccagattgctgagcataagcaagaaatttccctccgcacacctgacgcaccacacacctgcccccagctcctcacttacaagacaatatcaaatcagacagggactggtctgggtcccagatcccctcaggttgccgctgtcctctcagatccccacacacagcagactcttcccctcacactcctgttccaggttactcttctccaatatgatgggggtttgctttcattgtttctgtattttttgtatttttatgggtaagctgagccccttttacctggtcttgagtcaggcaggggccacacagagaagaggaattcctccccaggggccagcagtccacggatcaaggcatcagggacctgagcagtaggttctgttcctatgcctggacccaggaggcccatgagcctccagcagtcagtatggagcagccaccaggggggcagcaaagagtcacctgggaaagccacctcgggatggggtggacctgggcatcagggagatgctgacatgcagggagggtcagtgaccacgacctgacacctggagggaaaataggtccttctttttctagagtgttgtccttgacactgatgtaaaaattctagcatcaaattttatcttcagcttttgtagatgctcctatttccctgacaaaggtccaggcacttgacttccccacacatcctctcctcacacacccagttgtgctaaaatgctgtccctgtcatgcacagtgtccttcctgaggtgacacgtgtccccctccctgccctttgctctgggagcccctgtcctgtagacacagcagcttcttcttccctggctgctccccatctccactgtccctgggctttcccatctgtctcctgggaaagctgccaaatcacaggtctcaatttccttgtgaggcacaaaatagttgctcattaaccttctgttgacttaattaagtttttaattccttgatttgttttccccagcaactgaagacaacttagtcataataaacattcacttccaggggtcttgcagtttgctgacccctctcattctctcatggagcaaacattttcttgacctccttatctgtcattggtcctcacagcaccctggggacactgaggcacagcatgtacgacctgccctggagctcacagccaacgaggaaacttaccgcatcccatggatcttccaacactccatgtgcacttggcaaccaagaaattttattcttctctagcactgaggagctgtgccctggggtggggtctgtacctatccaaggcacatgctgtcacctgtagagtgtggatagagggtccttgcattaggttctggaaagtgtcttcaaaaacggatttaggcctacacccaaaatctcctctctggcacaaattattcatgatcaggatacatctagaggcctagaccaaaattcaccacctccctcctgagccagaatggaatggaggaggggactggggaccccagataatttccccatcaccactgtgactctatggccacctcctgcaacagttagggataatcacataggaagggcttcatgtatcctaggaaaaacacccaaagtcatttatgagctctaccatgaccaagtgagcccaggagtcgggttgagcacagcgtggtgtggagatatctgcagagaccgtggaaccagtttgtaaaggagatcctgtaggctgagggtgagagtgcaaggccactcctccccctctctgcatcctttggggctaagcccttctctggaaaccacaaagctcctccagtagcagcccttgactctgctgatttgcatcacaggctgctctcttcagcaaggggataagagagggctggaaggaacctgcccagcctgggcctcaggaagcagcatcgggggtgccgcagccatggcctggaccgctctccttctgagcctccttgctcactttacaggtgctgcccccagtgtcccagccacctacccagctccaaggctctgggtccagcctggcctgacagtgatctcagcagggccctgcctgtggtgtgcaggatgctcatgatcctgctgcagggggaggggctgctggaggtgaaatccccccacactgttcttctgtgctcatggtcccctgaggacacttctattcctgaaactcaggccaggcaggtgggaaggcattgttgggttgagcctctcagtttcaagtctattctattctctccccttttcttgcaggttctgtggcctcctatgagctgactcagccactctcagtgtcagtggccctgggacagacggccaggattacctgtgggggaaacaacattggaagtaaaaatgtgcactggtaccagcagaagccaggccaggcccctgtgctggtcatctatagggatagcaaccggccctctgggatccctgagcgattctctggctccaactcggggaacacggccaccctgaccatcagcagagcccaagccggggatgaggctgactattactgtcaggtgtgggacagcagcactgcacacagtaacacaggcagatgaagaagtgagacacaaaccctttcgccatctatgtcaccctctttctctaattcaaggaggactatgaacaaagccttacgcagatctggttaaattctctttaatctctgcccccagcctgtccctccctccagtccttcaggcggggtctgcagaaagtgcatcagtagttcatttagggtgatgtgatcaggatggactggtgttttggtgactcagctgtgacttgggaaaatagggcctgcatggaagatcagactgaggtagacatccacagttgtctctggatttccataggtggtgacaggccagtccttgccccaaatgtcctagatcagtccccagaactgcccagctcaggctcctgtggtagcctgtcattctttagagaaacaccaatggagtagacactgtgggatctgcccagatcccctgttctgagcttacccactaagcactactgggagcttctggcaggtcagagctgtgtcctcactggaaagtgctgttcggtgcagaaaacagactcctccaggtctatgccctttctcagtgaggttagatttcatgactgcctgaggccgagttctcgactctgcctcaatataggaagacctgaaaatcctcccagctccacagctctctgtaggaaagacttgagacctcaatgagggtcagggtctcctgcccagggttgcctccctcacctcctttcacatcctctgtgcatgcaattcctcatctcagagtctgcttccagggaacccaattaagatcaccagccatccccaacatgggccatgtgggacttcaggaggccactgtatgctggaaagcacctgtttattcctaaattagcactgtgagtatccacacgcccaatgagatctgagtgtttcttgcatttgcatggaatgagaagggagcctgactcgccaggtgctctggggtctaagggagagttggagtcagatctccctgcagggaaacctggggcaggaggagcagccttaccccatgcagggaccacagatgcacccacagggtgagcttaagtatggacactgcctacctccaccctccacatcctgtgtaaaaaatcattctttccacccctcctccagcctatcaaagttgacacttaaaaagccaccacaacccacccttgtcaacaggaaacccattcacatctccatcagccacacaatctccacataaagattcttcaaaaaataataacaatagccatgcaaagtatatgatatatatcataaataattgtacttagattatatatgaaaatgatactctttttgatatgctaggtaaataaaatacattatttaaactcattgacttcttctctttgtatttataacatgatgactagacagtgggattcccatgaggctcacatcacattgtgattgaacaaggctggtctgcagggcttcaggttacaggggctgtggagtgacctggtgcaggaagccccgtctccatccataggacatcagtgtgaacccagggagaggcgctggtataagagagatgagaacacaggtgtgaaccacctgcttgtgcaggggactgagccttcactttgagccaaataagttttctttcccaagttcgatcctgaacaagagggctttctggacttctttttgttttcaggtttgtgccccttcaggtttggggctgtctggagtcccagccaggggacagtgaggaaatccagcagtctcacactgactctgttgtatttcatctgctggggccatcccaaactgctgcgtaccatttcctttcctggtgctcaaatagctgctccatgcacttgtcatggttttatagctcaatctagatgggaagacaggatagtgtatgttacaatatttaaatagaacctgaatcccttaatagttattttaatatggaacattaaaagagttgcatcataggcaatggggaaagatgaagaaagattaaacgcatttggaggaaaaactaaaaatgtctttattgaatgtctgtgtgtcttcagtgacgaagggttgagagaggtcagctttaggttgtcctgaggatgtgctcagatgggggaaagtaagaaagcaggaaacgtgcatctctgtgacctgacacataaatcacagtaaaatggaagtaaatctttcaataaacctttcaagataacatcactctggtgcacatagaaaggcctgttagcaaactttcccttttccctgctggctcatatccccatggatcacctgtatgcagaacggactctgtggtctccatttatcaggctgagaaccagaggctgggaaggacaagtcacctgctcatgagtgggaggggcaggattgggagcagcggactcaggctcaggactgtggccctggttggtgctccttgttcccttcacagggtcccacccacatgtgcccgtgtggatgtgggtgcactgcctggggtggctgatgtgctccagggatttgatggtgcagatgcttcaggacaaagcatgggagtggggatgggacgagctgccgctgggcagaccaaggaccaacgccacccagcagaggcttccagtggggttgggcagccccatttcctgagaatagagagaacctggcaatgagtgccagaaagaagttacttcgaggtgtgcccaggcctggagggtcacagagacacaggcaccacacagcagagacactgaaggccaagagctcactcaggtgaagggcttcaacagatttttctctcctgagcaaatcacgtgcaaagaaatcaacttcctgtcatcagaatagacaatcaggactttagtctccttggctgagccccgctgtcaagggaagcagaagtctctaagcccaggcccaagtgagggtggggtgagaagaggagctcaggatgcagatttgcatggaggtcccgcccttctctgaggcagagggataagacagggctgggggcaggcccagtgctggggtctcaggaggcagcgctctcaggacgtcaccaccatggcctgggctctgctcctcctcaccctcctcactcagggcacaggtgatgcctccagggaaggggccacagggacctctgggctgatccttggtctcctgctcctcaggctcacctgggcccagcactgactcactagactgtgtttctccctttccagggtcctgggcccagtctgccctgactcagcctccctccgcgtccgggtctcctggacagtcagtcaccatctcctgcactggaaccagcagtgacgttggtggttataactatgtctcctggtaccaacagcacccaggcaaagcccccaaactcatgatttatgaggtcagtaagcggccctcaggggtccctgatcgcttctctggctccaagtctggcaacacggcctccctgaccgtctctgggctccaggctgaggatgaggctgattattactgcagctcatatgcaggcagcaacaatttccacagtgttttaagtcaatgaggaagtaagatcaaaacctgccctgggctctcaggccccttcttgctctgcagatgcttcctcacgctgtataagggtttcctgcaggatggccttgacaattctcctctctcagctcctctcctttcccaccatgaggtctaaaaggaaacctgctcgtgatttctcgttcaggactgtggcaacttccttttgcttgtgtgctctggtcccttaacgtgcaactattcctagctcttcaatgcagggacgtagggacaaggagtttactgcttggtgcagtccctcctgttttcaggaacatcctcattctaaatgcatcccccatctgccacactatgcagatcaatctggacagaagccatcagggggatggcttccagtttccaggaattgcatcttgttccactctgtgtccaccacgctctaatgaagatggccctcctagctggtctattcctctgcacctgggtcctgaagcagtgaccactttaagaagacttgaagatgtttttgagggattaagaacaaagaggatgctgctgtttttctttttattgctcctgctctttgccgaaattcctcaggttgctgagctggggagattttgagtgacaggctcagtgctctcgcagaattctcctcccctcacatcgctgaggccctgtcctggaaactcctcacaagtggacggtcttcccataggatgggggattccaaaatggctccacaggaaagagttaacctgagtccacctcccttcctcatggacatcgagcatttctaattttcatggctgtcaatacttttgtacctggaatccctaataatctaatggtgagaattgatttagaacacattcggacattagctgggtccaatatttaaattttctgagccagttgttaaatacagctattatcatatatagtttaggctccttaaacttcgattatacagattatatttaaaacaaagtaactagtttactatatatatttacaaagtaactactatataacatcatgttgtgtacctgaaatataaacactaaaatttatttcaaaaaccaaagtgtattgtctattgatgcataaaaaaacactcacaaaacttagcacactaagagaacacatgtctgtgaccttgtgacttggatgcacctagaattgggagtagcttagtttggtcattctcgctcctggttaatcacgaggttgcagccaagctgtcaggccaggctgcattcaggctacatctgccaaagaggttaggaactgtggaagcctccctctggctgtggaagcctccctctggctgtggaagcctccctctggctgggagacttccgcagttcctaacctctttggcagacgtagatcatctcaaggataaaggagagagtggagtgaaggcccctgtccttgtcctccatgtaaaaggccatcccatgcatgcactattttttattctttgctgagacatcctaggcatagagcactgccccattcattcaaaggttgtagagtattctatggtagaattttagccaactcacttttaatggttattatcactattttgatcttataaataacactgcagcgaacatccttatgtagactcctttgattttatatgtagacatgaccatagaataaatttctagaagtcaaattgctgagtcaaaaggatgtgtgcttgtaattttcactcactgtcctcagattctcctctagaggggttatctacaaattcgcaatgtcagccataaatattcgaacagagtacactggggaaagtttaaatgtttttcaacctagcagatttaaaaatgttatctttttttagttttgatttctcctgttctgcttgaagttgagcattttctctaatacttcagtgctatttatttttataatttggtaaacattttcttaaatgtccagataagaaggattttggtctgtggttcccaagagtcaactttgaggatattctgtaggtatttttagcaccatttatagtgtaaccatttaaacctataaaaaccactctcagctctggggccatggaaaaacaggtggcaggacagggatggcccacaggatgtggtttaacggtccctgatttgtagggtaatttgaagtttgagaattccaccgcatatgttctaggtggagatctctatttgaaggatactgtattttacctcctatagtggcctgaggcttttggataagaacatacttgtatcatctatttaattggatcttgggtcttcccaggacagccctgtgtcacagtctcatgtttttcatctcatccatttgctctgagttttcagaaagctttagtatatcagaaatagactgaccctaggtggaaaatcagaggtaccgggagcagcaaatggtcagggaagcttgcaccaactctggaataaaccagtacaggctcagagaaaaacatcataaaatcagcattgtagctgaaaccaaaaacatgcatgatctttgaagttctggggattataaataaataaatgaagtttaaggtttaaatgtgttgcaaatttacataaagcatgtagattttaaaactcagaatgcagcaatgaaatatggaagcttgagattttaagctgttaaggccctacaacaaattgccaggaacagaacaggaacttgatagtcataatgtcttatgctggaaattatcattttctctaaatgaaatttttttcccttttttcttagacataaggaaacatctcattgaacacccttcttttccactgtcaaacacccttacccagaaaggaactgtaacattaagtaggaaacaactgctttttttcataactattgagagatttctttatttgcacatcaaaatgttgattgtcaatgctaaaattggaattagtagtttaatatgcacacaagagattaattttgtttggattatcccatttctgtctattatttgtcttagttaactcagacatattctgcttttggtattttttgttttattttctttgccaactacatgtaaaccaaaaataaaattctaatgctcccccaacaaccccaccatctgagtggactctcttctcttggtgggggcactccaaagttaatctgaaagactggttcaggccatggcagaaaaggggtgtcagacatgtctcattaagcccttttcctttttggaattcaggaaaagccaacctgcacttaacatcaatacaaatcttaagtctgataagaaacatttacaatctattctctctgaagcctgctacctggaggcttcctctgcatgataaaactttggtctccacaacttattataacccagacattcttttctattaatactttcaaccaactgctatcagaaaaatttaaaatctatctataatccagaaggccccacaaccctgcctcccatcaccctcttgttttgacttatcctgcctttctggactgaaccaatgtatatcttgaatgtatataattgatatatcttgtctccctaaaatatataaaaccaagctgtgccccaacctccttgagcacaagctctcagggtctcctgagggttgtgttcaccagtcatggtcactgatacttggctcaggataaatatcttaaaatattttacacagtttgactctttgtcaacatatggctcttttcaaaacaccatttgacacccagacataacccgctgctaatgattacaaaattcaattttattagcatttaaattattactttaaattatttcaagaatgcatggatgtgatttcccccacatctaactcacaaatgttgctgatgctgacttgctcttttctttcagtcttagcaaataaagagggagtttacttttcttgataccagaagataacaggagaaagtaggtgaaactcccgaaagctgttatcgtttccaccctcaggatgaatcacacaaggagtcacctgcacttcatttggatgataaataaatgagatggatcttagagttggtgctgatctagtcaatgatttgggatgttgggctgaggtgaatgtgtttcacaggtgagaaagacatgagttttagagtccacagtgtggagggttattggctgaagtgtgcccgagaattcatacaatgaagctctaatcacagtgcatgaatgaattggaacataggtctttaatggggtgattaagtgaaaatgaagccagtaggatgggttcttttccatctgacaggtgtcctctgaagatgaagaaatttgagcacacagaaatgagacaccatagatgagcatgcagaggaaagatcacgtgaggacacagaagaagggagtgatttgcaagccaaggagatgttacagtagataactaggcagacgtgacagggcaggagaccccctgccccaggaatgtcacgcaagcatcagatgatggtcaggtagttgttaaactgtctctgtgaattaataattagtcacagccggcaccaaggaaaggcggtctcccaatagatagaaaatacctgaagctggtgatcagcagctttctgataagatctcaggccttgggtgagtgggctcaagcaggcaaactaaaaggcaaaacagaggccaggcatggtggctcacccctgtaatcccagcactttgggaggccgaggtgggccaatcacttgaggtcaggagctctagaccagcctgaccaacatggtgaaaccctgtctctactaaaaatgcaaaaattagccaggtgtggtggtgcatgcctataatcccagctactcagaaggctgagccaggagaatcacttgaacctgggagatggaggctgcagtgagccgagattgcatcactgcaccccagcccaggtgacagagcaagggtccttcaaaaaaaaaaatgcaaaatagcagagtttaacctggatctgagactcccatgctgcccttccctccagccctacaggcaggctctgcagagagtgaatcaccagtaaatacacaaacaaatatgattacgttccttttgtttaagaagtagaggaatgattgaatatattaagtgaaaataaggaataccaacacaaagaaaaatttaactgtaagtatggttaaaaatacactgggtgagatagacaagttagatgtcgcaaaacaagagattagcaaactgtatagtgtaacactagaaactattcaaaatgaaacacatagcaaaaaataacgataaaaataaacagcatcaatgagatgtaggagaacttcagacaggctaatatacgtgtaattgaagtcctcagaatagaagatggggtaagaatgaaaagaaaaaatatttgaatgaataatgacaaaatatgttccacatttggtgaaaaccataaactgatataacccagaagctcgataaaacttaagcataggaaacacaaagacaacaactccaaaacacatcataatcaaattaataaaatctagtgatgaaaagtagtcatttaggacaaaactacaaagagcagatttctcattaggagcaatgcaagcaagaagatagtgaagcaatgtcttgaaaataataacatgcaaaatccaacaaccttgaattctttatccaccagaaacatctttcaaaactggaggcaaaataagactttttcagacatgtgaaatcctacagaattgatcaccattagactctcgctattagaaatgataaaggacacccctaaacagaaagaaaataatcctacattgaaatgtggtttgacacaaagaaatgaaaaatcagatatggtagctacctggatcaattagaaacctctgtattatgtaatgtctataaaaagaacagtaatgtctataaagagaactgttcagagaaaaattaataagaatacactatgatttgtaataaaaataaaagcaaactatatgacaaagcagaaaagcgaaggtgggtgaagaacatgtaataatggttttgtactatatgtgaatatataatagcacctgaaggtagattttggtaagttatgtatttactgtataccctaaaacaaccattaaaataaaaccctcaacaaaaaagaaatatggctagtacgctatattagacttgtccaccaaaaattaataggatatgtatggatatgaatatatatgtataatgtatctatatggtgagagagacagacagaaacttattttaagaagctggttcatacaatagtggtggctgatggacaaaatctgttgggcaggctataggctggaaatttaggtaagagttgatattgccgtcctgagttcaaattctgcaagaagctaatgtttccccaagacagcatcagctgttattatgcacactggctccaaatcgaggaaagtgtcccccctgaccattagcagagctcatgccaagaacaaggctgatcattaacatcaatcactgggaaacttcagtatttattctaaaaaccttgaactcattaatgagactcacacacattgtggaaagtagtattgatacaggagacagaaattatttaggcagatagtgagggtgacagggtcctcagcagagcttctcatctaacaaaaagcagccctaaaaatcatttcttttataacaaagagcagcctgaaaaaatcgtgctgcaaacatagataagcaagctggaagcttgcatggggcaatgccagcagctatgccaatagaaaagtactacctgggggtcagccatgtccaacatggaggctccatcttccctttttttgtcaccatgtgtatagcaatagagaaatgggcaacatggagcagctcaggcagataacccacctgcgtaataacagattagggcagggttggccagaaatgtgcaccctatgcaaatggtacacctagtcctaatcagtttttcatgccctgtgcaagtagcacacctggtctaaccagtctttgacacccaccttatgtagatcagatactgcctcctcaccagctcatctataaaattccctacatttcactgcagatccggcaacccatttttctgggtcccctctctgcagcagagagctattatctttctttcacctattaaacttctgctgtcaacctcatttgttgtcagatcatgtcctagttttccatggccctgagacaatgaactttgagtattcaccccagacaatgaggctatttcaatatgcttatacaaagtctactggtttgaatatttatcacatttgaaaaatatcttcatgacaatgtctacactggtgcttaacaaaatcaacctggtaccatgtcttagccaatctgacacttaaaattcaccaccacttaagccaggagctaaagaaaaccaatttttaaaaataaatttcaaaagagagaaaaaggaaagaggaacaatgaacatataagacaaatagaaaaaaagagcaagatggtatattttaacaaagtatattcctaatcacattaactataaatggtctaaataccacaattaaaaggcaggtattatcatctatattctaaaggagttcaggtagggttggtatgctttcttccataaaaatgtgataccagtgaagctatttgggtataggtgggcttttcttagcacggagattttaaattgctactttaatatctttaagtgtcatagacttattcagattttctatgtattcatgagtcaattttcataatttatgtctttccagaaattttacttcatttatctataattttggcatttactgttcataatattccctataaccattctcacccttttagtgtctatagtgatgtcattattttagccatggttttggcaacttgtgtttctttttcttttttttatcatggtcactttacctaaagataaaaatctattgattttattaatctttttgaagagccaagtgttttttttttttttttttgaggttttctattgttttcctattttctatttcatgaatgtttggctgtgatccctattattaccctctattcacttagaatttgaatgttcaccttttttaggtttatgaggtagaagcttagattattttctttaattctttcttctttccaatactaagcatttaatgccatagtttttcttcaaagcagacttagctgcattccttaaattttaatatgttgtgtttttatgtttaaaaaggttcagtatcttctaatttatgttgtgatttttctttgattcatggattacttaacagtctgttctttcactttcaaataattgaagatttcctatggttcttccggtattaattcaagttaattagttaattctgcattaaattatatcttctatgattttcatcctttcaaatttatcaatatttgatttatagcctaaactatgaactatcatgaaaaatgttccatatgtatttgaaaagataacatgtattctgctgttgtgggtgcagttttctacaaatttattataattaagataacttggcaaatggttcaaatctatattcttactagatttctgtgtagttattttgtagatctctgagacagagctattgaaatgaacaacacaaactgtagaatttcccaatgattattttgagagagatcatttttaaaatcatggatctaaataatttattctcctcacaaaatgtcttctatgatttccaaatactaatcaagggaagaaggcagagttaaactcacacttgtagataccacgggaacagtgagtgatcatgtgatgtgcctccagaggttaggctaatgtagttagagtggtttatatttatttatttatttatttatttatttatttatttatttagacagagtctcgctctgtcacccaggctggagtgcagtggcgctatctcggctcactgcaagctccgcctcccaggttcatgccattctcctgcctcagcctcctgagtagctgggactacaggcacccgccaccacgcccagctaattttttgtattttttagtagagacggggtttcactgttagccaggatggtctcgatctcctgatctcgtgatccgcccacctgggcctcccaaagtgctgggattacaggcgtgagccaccgcacccggctggttttttttttttttttaaacacacagttgggctaaaatatccatgaaaaaatttgaagcatgtaccttgaataaaatatgaaaatcaaaaaagttaattgcacacgtacaacattgttaccacggtgcctgccgcatgggaaatgaacaacaagtgttattaattcaattctattttcttacacattcaatgaatatgtattgaaacaaattcactgaatggtcccagatactgaataggtccttgagatgtactggcaaacaagacaaaaaaaaaaatacatgttctccgggtggcctcatggaagatggtggagtaagaagctccaagaaatggtccctcctgtgatataactattgaagtggcaagaaccatcagcattcactctaataaaactatggtatctcatcccatatttgcagcatccagggaagagctgaagaagaaagagacaggcttaaggaagtctctgtcaggtagatctctgaccacagagataactgaacagaaatttcgtggatcactctgacaagaaaggtagtccttgcgaaaatattcaggaaaagtcacaacacaaataaacaactgcacccctcagatgaacaactgcacaatatcagccaaggggcataatctgataatctgatcctgggagttaacaacatcacaatattcaaaatactcagatctcaacaaaaatttgcacagcatacaaagtcacaagagagcacgactcattcccaggaaaataatcgactgaaaatcttccttaagaagcattcatttgctcccatcttctcccttggttatataacacgtccttccacatatacttgattagagcttgtgccccacaaacatgcctggcatgtacattagtgacttctgagagggaggtgggggcaggaaacagtccctctggatacatttcgcatcacatgaaccagtgaacacatctctgcaaggtcctgcattctaataaacaagatttttctgtttaaaagaaaacttaagtctttcagaaaactgcatttcaaaagggaaccttgtctctgctgcttgggctgcagtgaggacagatttactaagtgctggttgctgtgttttgtcttctagtgtgggtacacacatctagaaaagttttaaagaagattggggaacccccacccagcactggtgggactttgagtttgctacggttgtgaacagaacatggaacagaggacaaggtggcccctcctgaagatgagagttttgcttcttgctggaagtccctggactcctggagtgttctcaggggacctcttaacaggatctcaagggaaagaatccagggtactggatccacacaatcaacctcacggatttctgagtaggtcattaacctatcatgcctttagcgttatctcaaattatacatggtatcatctcaactaatgtctaaaacaatatacggcatagatatctaaagaactagtggtacatggaggatggctttctacctctgagccctagaagggactgtgggccttggtttggggactctaatgactctaagtcccctggtagtgctcaagtgcaaagggaatgactgacgctttttttgaggccccttctattgtgtaaaatttattctgtacttgtgacacccacctggtccttcttctgaacatgggaaattgccaagatgaagtctccaggctaacggctcagacaggagctcagataaacatgctgggaagtggagagcaaattgacattcaaagctcctcccaacaagcttcaagaagagggtaacacaagaagtccttgtaaccaggttccacggggcagcctcaagcagagctcttggaagtccctcccaccacggtctgggtctccttctacctcctgcccttcattttctccacaggtcagaacatccagggaattcagggaaaccctttcactgctatttctccacaagctccaatcctcaggggcattctttccagttctcccgagcattcggcatcattcatgaaattctatgtttccaggtctctgtgctctggctgtgctaactcagcccccgtctgcatctgcctcactgggagcctcagtcaagctcacctgcaccctgagcagtgagcacagtacctacatcatcaaatggtatcaacagagaccagagaggtccccctagtatataatgaagtttcacagcgatggcagacacagaaaggaggacaggatccccaattgcttctcgggctccagctctggggctgactgctccctcaccatgtccaacctccagtctgaggacgaggctgagtatcactatggagagagccacaagattgatggccaggatgggtgagccacacacagtgacacaaagggaaagtgaggccaaaaccccccacctcccctttctcctcagggactcagagtcagcagtcacatgtccccttccaagtccctgagacttctgactctcctcctgcagagacacccctaggcagaggcagatgcaggccatgatttaggccattttgacaactcatcattctgtctcctcaacaccagtctgtggggaccatactaggagagaccagagcagcccaggcagaaggaccctgagagagtggccaggctgagatgaccgtgtcccagtgtctcactgtgccctgtgctcccttaccgggctctgccccaggaaaggacatggatcttgacctgtcaccccccatttatgagagttcaatgtgtgtgcatcctcgttagcacttgatattgtcagtttttccttaaagtctttcagatagagctgtagcgatatctaattatgtttttaacttttatttctttaatgacttattatgctaagtatcttttcaggtacttatctgtcctttgtatgtcttctttggtgaaatatttaatcaaatctttgcatttttaaaattcaggtttctcaggttcacatttcctcatgtatttgtatgagtttatatgcatgcatgtgtgtctatgcattccattctgtgtgatttcccaacatgtatcagcacaggtatccaccactacaatcaagacacaaaccaggtccatcacaacatttcctggtgtttccctttgataatatctacctcctcccacccagttccctcccttgcccaaccctggcaaccactgatttggttccctattcctaaaattttgtcttgcaaaaacgtgatacaaatacaaccctattgtagtagacagactttggggttggaattttttacttagcatcattccctataaagtcattggaaaggtgtgtgtatcaatagtcagttcctttcaattgctgagcagtatctcttggtattagtttaacaaaacctgatgaattactcacccaccgaagggtatctggattgttttcagtttggagctactacacctgagggtgctacgaacatcagtttgtatgtttcttgtgaacataagtattcagttctttgaaatgaaggtccaatattataattgctgtgtcatacactaattaggtctttagttttctgagaagctgacaaactgttccctgaagtgaatgtaacatttttttctggccagtaatgaaggaatgatcaaatttctctgcttctttgggaattgtgtgtttttactctttttttaggtaactattgtgataggtgtgtagtgatattccattttttaaaatttcatgtctctgatcgttaatgatgatcaccttgtcctgtgcttatttgccatctgtatgtcctctttgatcacgtttgtgccctttgcacattttctaattagattgtcttttgttttgctcttaactggtattcagtgttgggtgttttgtttttttgagacaggattttactttgtcattcagcctggagtggagtgatgcaatcacagctcactgtagcttggactttcctgactcaagcaatcctcttgcctcagcctcccaagtagctgggacaacacgcacacacactgcctcactaatcgtttacagaattttctttgtagagacaagatctccctatttgcccaggctggccacgaactccttaggctcacgcaatcctccctgctcaacctcccaaggtgttagaattacaagcatgagccaatgcactcggccagttttcactgttctttatgtattttttatactagtcatttactggatatgtgattggcaaatacttaatgccagtctgtagcttctgttcacatcctctcaagagagatttttgcaaagcaaaaattgatggttttgttaaggttcaatttatcagtctttcatttcatgacttgtgtacttggtgaagtctaagaattctttgcatagacatagatcttgaagattttctccttttttttttctttttttttgacagagtctcgctgtcgcccaggctggagtgcagtggcgtgatctctgctcactgcaagctccacctcccgagttcacaccattctcctgcctcagcctcctgggtagctgggaccacaggcacccgctaccacactcggctaatttttttgtatttttagtagagacagggtttcacagtattagccaggatggtctcgatctcctgacctcatgatctgcccccttcgacctctcaaagtgttggtattacaggcgtgagccaccgcacctagccgattttctcccatttttaatataaaaataatagtatcgctgggcacggtggctcacgcctgtaatcccaacacgttgggaggccaaggtgggcagatcacaaggtcaggagattgagaccatcctgacacggtgaaaccccgtctctactaaaaatacaaaaaattagccgggcatgatggcaggtgcctttagtcccagctacttgggaggctgaggcaggagaatggcgtgaacccgggaggcagcgattgcagtgagccgagatcgcgtcactgcactccagcctgggtgacagagcgagactccgtctcaaaaaaaaaaaaaaaaaaaacagataaataaaaaataaatctgagagatggctgagcaatttcactgagtttcatcatggaattctggcctcccaaacaccagcatggcccctgttcctacaatctcctgcttcaagatcaacccaaccctgctacccagaccagatgctagatggtcaagacagggctgtgagagctaaagaatcttcagggtccacgatgaatttacattggagcttccttttccacggatattcacatcaatagagaagatgactgagttcttgcctacctctgtgaatacctgagacatgaactgagatgtgtgtgtgcatatggtgcgggcagcacttcctcactcaatactagggagagtgtgaggaaactggatacagacctggagatagggcacatttttacactctctattaagccctgtccttctgtgctcaccaaggagtcacccaacaaggccacaacaggaagagaagcaggtttctatgaagagacttctctttttgtgatgagggcccaggaagtccactgtctagctatgaactcagaggcagaactctgatgcatctccaccatgacctgaatccctctcctctactcacccttcctgctgtcggcacaggttctgccttccagggctcagccccataagactagggatcagcctggccctgaccttcagctcagcacagggagtgacgcagtgtgtggggctctgagaatgagaccctcatcttcagactcacctctcctgtcctatcttgtaggctcagtggcctcctctgagcggactcagttgcctgcagcgtctgtggctttgggacagagggccaggatcacctaccagggagacagcatagaatacttttatgcaaacttttgtaccagcagaagctaggacaggtccctgtgctggtaatctatggtgacagcaactggcactcagtgattcctgaacaactctctgactccatatcagagaacatggccaccctgataatcaatgggccccaggctggaaacaaggctattactgtcaatcatgagacagcactgatactcatctcacagtgacacaggcagacaggaaagtgagacacaaaccccttcccacctatgtcaccctccccctccaacctcaggaggacagtggtcagagctataagcaggtctggcccagttcactcagatttgagacccccaggctgcccttccctccagccttccaggcaggctcagcagagtgtaaattaagagtggatacacaatgaattattagaattgtatttcagtttttcaagaagtagaggaatgattgaacatgttaagtggaagtatagaataccaaaaaaggactaattgagcttgtactgctaataattacagcatctgagacattaaaaacacactggatgtgattaacaacagatgatgcaacacaaaagattagcaaactcaataatgtagcactagaaaatattcaaaatgcagcacataaagaaaaaataatgatgaaaatgaagagagtgttacagtatatttatagaaaaaatgaagagtgagttataggacaacttcaaacagcctgaggttggctgggaggggtggctcacacctgtaatcccagcactttgggaggtctcggagggagaatccttttgagactagaagctcaacaccagactagacaacataacgagacttcatctctacaaattttttttaagaaaattaactaggcatcatagcctgcagctgtagtcctacctacttaggagcctgagacaggaagattgcttgagcccagaaattcaagatggcagtgagtgaggtacgatcatgccactgcactctaacctaggacacagagcaagttcctgggtctcactctgtggttcaggctggagtgccatggtgcaattacagctcactgcagccttgacttcccaggcccaagagatcctcccagctaagcctcccaaagtttctgggactacaggcatgcatcacatgcctggttaattctttgtattttttgtagagatggggttctccctatgttgcccaggctggtcacaaactcctgggctcgagcaatcctcccgactcagccccgcaaagtgttgggattacaagcataagccacgccacctgatgtgaagaaatatttaaatacaacaacctaaagtatgtataattgacatccatggaatagaaaagatgaggtggagggtcagtagaaaatatatttgaataaataatggccaaatatgttccacatttggtgaaaaccaaaaattggtatatccaagaaggtcaacaaaactcaagcacaggaaacatgaagaaaacaactccaaaacacatcataatcaaattataaaatctagtaatgaatacccactttaaagtttaattccaagagcacatctctcattagaagtaatgcaaggcacagtggaacaatatttcgaaaatgctgaaaggaaaaacttgtgaaccttctgttatttatctaacagaaataacattcaagagcggagggtaaataaaatgttttcagacacataaaaacttacagaattgatcactatcacttttggcattagaaatggtaacagacatccatagacagaaggaaaatcatacccagttgaaaagcaaattcacacgaagaaatgaaaacttcagatagggcaatgacatggatacctatagaaacccctgtattatgttaacatctatgaaagataactgttcaaaggaaaattagtaaaaaaatcactgtgatttattgtgaaaacaaaattaaattatatgacaaacagcacaaaagcagagaggagtgaagaacatgttataatggtcttataccctgtatgaatatctaatcacacttgaagacagattttggtaagttatatatgtaccattaaccctgaagtaattattaaaataaacccttttaacaaaaaagaattatgactagtagtaacctgtattaggattctccacagaaacaatatcaatcagatatgcgtgtgtgtgtgtgtgtgtgtgtgtgtgtattgagagaaaaaagagtgaaagaaatgtattttgaggaagtggatcatatgattgtagtggctgacaaggattaaatctgttgggcatgctgaagtctggaaattcaaataagagttaatgttgcggtcatgcatgcaaatttagcaagccagcacatcaggaaatctccatatttgttctaaataccttcaactcactaatgagtcccacctacattgtgcagagcaatctgcttatacaaggtcaactaattaaaatgttcatcacatctgaaaagtatcttcatgttaactcctatactggtgtttgacaaaatcaacctggcccatatcctagcctatctgacacttaaaattaaccatcatttaagccagaaagaaaattttaaaaatatttctaaaaataaatcagaaaaggaaacaatagaaggggaaaaataacgaacatatgggatgaataaaaaatgaggagcaagaaggtatatttcagtaggattatattactaatctcattaattgtaaatggtctaaatatcacaactaaaatattgtcaaattgaaattaacagcaagactcaactatatatgctacctagaataaacctacttgaaattttagaaccacaaaaagccaaatacaaatcaacgacaatcttcccaacccctggtttcccaacaaagcattacaaaccgaattcacagggattaacacatagttaaaaaatatgtctcacttccaccaacactcttacctctcttcagcctctaatgcctagatcccagtaccagagttgcaagaaaacagggcacacaaatgttaaatcaaggttactaagggtcaccctcaagaggtaggtgaaaagagaatgagggaattgaagccacaagggtcccacttgcatggggcagctcctgcatcacaatgttgattgatacattattgatgagtttttgtccatgttcatggtggacataggtctataactttcttttcttgtcatgactttggctttggtattggagtaatgcaggcctcaaagagtaagtagaaaaatgtttcccctgctgtataatctgaagaagttcttgtaggattggtatcatttcttaattaaaaatttgatagaaatttactatttaaaactgggtgagcttttcttagcaggaagacttttaattgccaattcaataccttcaaataccatagatctatttggattttccatttcttcctgagtcagttttgatcatttatgtcttttaaggaatttttccacttaagtcatttatacttttggcattaattgcttgtaataatttccctaaccattttaacttttgtaaggttggtagtcatggcactcttttatcatggttttagtactttgtgtcctctttcatgttttcctagtcagtctacctaaaagtaaaatcaataggttgtatttatctttttgaagagccaagttttgttttttagaggctgtctattgtttttttttgctatttcattaatatttggctctgatctttcttattaacttttcttttttttgctttgaatttaaatgctcacctttagcctaaatttatgaggtacaagcttagataattcattttagatctttcttctttccaacattaagcattaaatgcaatagatttccttcaaagcactgatttaagctgtatttcttaagttttgatatgttgtctttttgtgttttaaaggttcagtatcttctaatttatgttgtgttttttctttagctcatggattacttagttgtgttctttcctgctcaaataattgaagatttcccatagttcatcaggtattaatccaatttaattaattattttggcattaaataataccttctatgatattcatccactgaaatccactaagatttgacttgtaacctagaacacagattatttcaaaatcatttaaaaatgtgctaaatgtatttaaaagcataatgggtattctgctctcatgtttgaaagtgtaatgggtattctgccattgtgggtgtagttttctacaaattcaattaggataaattggctatttgggaggctgaggcgagcaggtcatctgaggtcaggagttcaagaccagcctggccaacatggtgaaaccccgtctctactaaaaaataatacaaaacttagccaggcgcggtggcaggcaccttaatcccagctacttgggaggcagaggcaggagaatcgtttgaacccaggaggcagaggttgcagtgagcctagataaagccattgcactcaaacctgggggataagagagggacttctctcaaaaaaaaaaaaaaaaaaaaaaaaaaagataaattggctgatcattcaagtctgtatcttgattgaatttctgtatagttgttgtgtggatcaatgtcagggagctactggaatgatttaacactaattttagaatttctgattgattttttgagagaggaaattttcatgggtctaagtactttattcttctgacaaaaggccttttatgatttcccaagactaatctaggaagaaaaggcagagttcaagccacagttggtgataccatgggagcactgaatgatcatgtgaggtgcctccactggttaggtgtatgtaaatgaagattttttaaaaaactaattgggaggccgggtgcagtggctcatgcctgtaatcctagcactttgggaggctgaggcaggtggatcatgaggtcaggagatcaagaccatcctggttaacacagtgaaaccccgtctctactaaaaatacaaaaaaaaaaaattagccgggcatggtggcaggcacctgtcgtcccagctactcgggaggctgaggcaggagaatggcgtgaacccaggaggcagagcttgcagtgagccgagatcgtgccactgcactccagcctgggcgacacagtgagactccgtctcaaaaaataattaaaaaattaaaaaatacaaaacaaatctgggctaatatgtccagaaattttgagaaaatgtatgttgaataaagcatgaaaatgtaaagcaaggtgattgcatatgtataacattgctaccacaaggccaacctcatgggaaagaaacaaaaactgttagcagttcattatgtttacttacacactgaacaaacatgaattgaaaccaattcaatgaactgtcccagatactgtttaggtacttgagatgtattggtgaacaaaagagacaaaagtacctgatctcacagtggcattatgaaagatgatggagtaggaaattccaggaaatggtcctttctgtgaaataactactgaagggtaagaaccatcagaattaaccataataaaatgaggaaatctagtcccacattcgcagcattgaggcaagtactgatgaagaaagaaacaggcataagaaaatctctgtcaggttaatttttgcccatagaagtaactgaacagaaactttatggatcactctgataacaaagtccttgcaaaattattttggaagagtcaactacacaaacgaataactgcacccttgagcagcaacatcagccaagaaggagtagggagacaatctgattttgagagttacaacatcacacattcaaaatacacagatttcaacaaaaacttaaaaagcagacaaagttaaaaggaagcatgacccatttacaggaaaaagtttaatgaactgaatgtactcacaaggaagcaaaggcattggacaaatgacacaaatacttcaaataaccatttacatatgttcaaaaattcaagaaaaccatgcgagtaacaaccaaacaaaactggaagaataatgttagaacaagtgaggactatcaataaagaaaaagaagttataataaaagaacccaagcagattttctagaactgagaagttcaatagctaaaatcaaaatttcatcagataagttcagcagcagtttgagcaggcagaaaaataatcagtaaacttaaagatacattgttgtaattacacagaatgagcataaattttaaaagaataaataaaatgagcagagcctaagagatacatgggacatcatcaagcatatcaatatacgcattgtgggagactcagaaggaagagaaaaaagaaagtataaaatacatgtaaaaataatggctagaaacttccaaaattgatgaaagatatgaatctatactttcaaggagctcagtggccttcatcaggttaacctgacacagactcacagtgaggcacaatatgctcaaaccatcgaaaaccaaatacaaaagaaaaatattgaaagcagcaagagaaagagactcatcacaaacagtagattctcatgaaattaacatttggtctttgatcagaaacaaaacagtccaaaaggcagcacaataatctataaagtgatttataaaaatatattatctaccaattctgcatttagtcaaacaaatcttctaaaataaaaaataaaataagataatcatagataagcaaagtttagtagacctggtagatctgccctaccagaaacactacaggaagtccttaagtctgagaaaagacactacataatttgaatacatgtgaagaattaaagatctcttttaaatataaagctagtgctgttgtattgttggtatggagctgctgtgttttccatgttatttatgagatatatggaaaaaaatcaataattataaagccatgtacataggcacaaaatgtttaaagatgttatttgtgacattaacaaggtctaaaaggagaggaaatggaactggataggaacagaattaatggatattattgagactaagttcgtagcaattctaacaattttaaaacattaatcgttactccaatgataactagtaaaaactaaattgagtgtataagggaaagaaaatgaagaaggaatccaaatggacccagaaaaaaattaatagaacacatgggaaacaattattggggtaatttaggaacaacaacaacaaaagataaaagatatgtagaaaacaaacagcaaaatgacagactttctttgttatcagtgattactttaaatataaatggattagattcaccacttgaagcaaaataacaaaatgaaatttttaaaagtaaaaaaaaaaaatagaatccatgatctatctacatggtgtttatggagaaccaatttagacccaaagacacaaataggttgagtaaatagtaacaaaagaactggtgtggctgtcgtgacatgatgcaatattgacgttaagtgaattatagttgtaagtgagaaaaaagggtattccttattgataaaatggtcaattaatcaagaagatataatagttatacacacgtatgcaccaagcaatagcacttcaaaatatgtgaaggaagacacatttaaaataaaagctagagagatctataatataaattggagacttcagtaccccactttaaaaaagaatagaacatatgaacaaaagattaatagaaaatgcagctattgaacactataatccagctagacctaacagatatatacaaaatactgcacaaaacaaaagcagaatacacatctactcaagagcacatggaacattctccagaatggacgctattttaggccttaaaacaattctcaacagttttttaaaacttgaagtcatacagggagtcatctaaaaccaccaggaaacgaagtttgggtaggggaggaacaatatttccttctactcaacttagatttattggccagcagtccctatcacacaagacagattaaaaaataaactcatgcacatttattaaatataatttttacttggcatgggagctttaataaggaaatgaaaactcagagaaatggctgaacctgaggactttacatttaggtatgatgaggagaatacaggtgtggagaaatatgactaagaatgaagtaaatgcagtaaatgggggaaagagcaaggcctgtgttcattcttctcagcacaccttcattttagaggaaacaatgctctcttttcctcttctttctaatcaacaactcaactttacagctcatggaacaagaaagagaaaagcaaacttaaaccaaagtccacagaaggaaagaaataagaatcattagaccagagattaaagaaatagatgagaaaaaaaactataaagaatataaatggcataaaaagttcctacttggataagaagaagaaaattaacaagctgttaggcaaaccaactaaaaccataagagagaagacacaaataacaaaaataagaaatttgggataatacaaccaacgttatgggaattaaaatgattataagagaacaccataagcaactgtatgtcaaatctagaagaaattgacaaattcatagaaaaatacaaattaccaatctaactgaagaagaaataaaaaatcagcataagaaatagattaagtcggcaattgacaatttctctaaaaagaaaagcccagagccagatgtcctcactggtaattctactagagatttaaggaggaagtaataccaatcatactcaatctcttccaaaaatagatgaggagggaacactgcctagcacattctagaggccagcattagcctcgtagcaaaaacaaacaaggatactataatacagaaaactattggctaatactcctgaagaataagcatctaaaattcctaaattaaataagagaaaaccaagtctaactacacattaaagagaacacatggaatgaaaaagcgagatttatcccagaattgcaaggatggttctacataagcaaatgaatcaacgtaataaacaatatcaatagagtgacaagaaaaagcatatgatctcagaagatgcagaaaaagcatttgacaaagttcatccactttcaagacaaaaacacttagcaaactaggaacagaaggaaacctgcacaaattgattaaagaagggcctttatcaaaatccacagtgaatctcacagtaaatggtgaaagagtgaaagcctccccacaaagatcagaagcaaaacaaggactcctgctttcacagctgctattcaacattgtccaagaagtcttaaatttcattaaaacaaaaaaggctagtgctacctcccaccacaagcatggatcagcgttaggaaattaaaataatggtaatagaaaaattataatgacagtgatgatggtgatggttttttaagtacacaactgaggtttagtggcagaaatccggtacttccaattacagtgcagctgtgcttattggggtgacggaatcaatctcgttttcagtatacatgggaagcaggagtacatgtagggtacaactgcatttctctggaactgtttttcacagaagagctacagtttatcctgcactctccattctgtgatcaaaaaccatgaaacagagaaaagcacttcaacctgagactcagtcacaagaactgcacctgccccaccttcccgcaactatatatgccacctctctgtgctgaaccatgaaggccagaggggttcacatgtggcacagacggaggctggactccctggtccgcaccctcccaggtgacgggtgctctgggatcacctggagaaggcaagtgcctgggctctgtcttttccaccagcagagggcagcagagctgcagccagaagagaggctggggctgcccaggaggagcctatgaaggaggccagcctttgtggggggtggtcaacaggtgttcaagggatcagtcctcactttggaagtttggtatagtccctcctgtcacctggggctgcagtgttcatattctgagggtcagacacacagcatcacccaggatactgacaggggcccaggcacagtgacggcctcagctgggaaacacaactggaggcacctgggccctggtgtcagcctgggcagctcccatagggctaggatttcctaagagacgctccgaggtcaaggtgctctaggagggggaacagtgtgaggggacagggctcccggggctcaagcccttcacccaggatggctgcctgagcctcctgccattctaagggtctcattcctccgtgtccagcagcatcctggggagctgagccctctacacttggcacttccagagacaccctaccaccccctccctctccctctccttccagctccaggccgactctgactcagaggcagctcctatgctcaggggattctcaggtgggtggcgtgggacatttgggatcctggtccctggatggggcattcccagcctccttgcggagatgctctccagagggaagggaatgttcacctgcctcaggccacagctctgaccatgggactatcctgggctcagtgacaagatctgtctggctggagggaccagggatcccccaccctccagagctcatgggtgttcagagaccacgacgctggaaccctcacagagaccaaataacctaaagttagtttctcagtcaggtctgggtttctggtgctttttacacatttatatgaaacactgatgagaaaaaataaagaatcaaagagcagaggatggcaatttctagtctattagagagatggggggtgtcatacaaggagcaactcaggtgagaaacgagactagactgtgtaatgaatccacatgagttgtggctgctcaaaggaccaaaccatggtaatggaaatcaagtttaggatataagtatcctaaagacacagaaccacattctaattaaactaccaggacaggaccaagtgagtctgggaaacccagagctgacttggaggaggaggaagatgatgggttcctggcccacctgctgctgagtcaggtgtcattgatgatctctcagcacggcccagctcagccccatggccaggctcctggaaggtccacagccctgctgagcctggcctaggacacagcacaggccaggatggtataaaacagtggtcatgtggccaaactccaggaggtgactgtgatcacaggccttcaaggatggagtctgatcttctgaccagagaagcagataaagtgagctgggacccacttcttcttcctcagtctgctgtgcttcccacagagctggtttgagtgacatccttcagtgaggagtcccagaggatgccgatttgcatcaaacactcactgcctcaaacggcctgagaggcaataagagagagctggtgagcccagctgtgctgtgggctcaggaggcagagctctgggtgtctcaccatggcctggatccctctcctgctccccctcctcactctctgcacaggtgctgcccccaagcccttccttcaggctcagaacccataggatcctgagctgggcctgcccaaacatgagttcatcccaggcacaacctcagggtgggaccccctgggaacagattcatcatttacaagcctcctctcctgtcctctcttgcaagctcctatgagcttacacagccaccctcagtgtcagtgtcaccaggacaggcagccatgatcacctgctcttgagataacctcaaagatgagtatgtttactggttctggcagaagccagaccaggcccatactggtgatatatgaaggcagcaagcggccctcaggaatttctgattttctgagtccagctcagggaacatggccaccctgaccatcagcagggctcagactgaggacgaggctgactattactgtcacaggtacaatagaaacagtgatgagcccacagtgacacaggcagattaggaagtgagacacaaaccccttcccaatctgtgtcaccctctttctccagccccaggatggctgtggacaaagccatgagcagggctggtccagttcacccagttctgtgacccccaggctgctcttccctccagccctccaggcaggttgtgaagagggtgagttaagaagagatttgaggctgtgtgacaggctatcctggggtttttctggccaaggataaagctggtgaaagagagcctgaatggacgggcagacagagtggcccatgcacgtagtggcaaaagacctgggtttccacatgccagcccttcaggcaggctctgcagagagtgggttaggaggagatttgaggctgtgtggacaggctgttttggggttttctaacccaggataaagctggtgaaagagggcctggatgaaaggacacacaaagcgtatctttcatctagtggtaaaggatgtgagttccatatggtgaagcctgggtcaccccttggcccagacgtcctaggttagtcctcagcatttccctagcacttaagttcctgaatctcctggcagccttatattcaaaacggtgtaagctggagtggacgctgtggggtccacctagactccacgttaaggtcgacccacacactctcagagcctacgagtggatacccatgctgtggggcacatgtcacctgacagagtggctgaccacccctgatctcttctttctgaccacttgggtgtttggcactatgtccatcatggacactctatgggctattaacctatgattcaaagtttcttctgtgtggtgcccgtgcccaaagaccacccacaggcttctgcccatactccacttcccccatttccaagtttttctcttgcagtccctggaacacctgcccaggtcatttcccactgccctaagcccctatctgccctggcatccggccactcacctttcctcacaaaatgaatgaccaggcgccatgccctcatgcaggaaagatgtcccctctccattgtctcttaatgccaccccttagtacacccatatagtgcagctgtgctctacttcatggtgatccagttcattgctgggctactctggaaatttttgctccatcagctgagcagagggactgctacccacacaacgtaagtgtaaacccagggagcagtgctagagcaagagagatgcaaacttggctgtggaccacccacaggttactcagctctggggccctgctcctgctccatcctagctgtgtcacatctgtctcaccagggatcgctgctggggtctgcctgagcacacgacgggggaatctggcagttctggctgcttggtcactgaatgtccgatgctgtcctgtatctaccagggaacaagagcacatggggagagttgttttccaaatgaatataattctctcttgtggatgacatggaattgttccaaatcccatgggattggaatcccattgggaaaatctcatgggattttcccatgagagattgcgtaaacatgagttttcagttcctatcataaattcttccattcctatcaccaattctgtgactatggtagagtctgctggattctgtggtcccaacagcaggacactcatacccctgcctgaacctggtgcagaacctccctgctctgggctccaaaacagtgggcgatgttcatggctcctgatatatgagttggagccacatccccaagggttaaatatgctgcctctagacaccagaatgaccttaaagctttgtgtttctttctggtgggaattgtaagatctaataacgtgctctttattttgtgagagatactaagctgctccagagaactcaatcctaaacatttcagctactacacaggatgaatggtcttagggcttgtttcgcactctcaggaatgcgtgggtctcaccaaagcttccaatagacagggccccctcatgcacatctgatccaaatacagaatagagccctaggaggttctcctgggtgttcagatggtcaaagcccctatgacaatatcatgaaaaagaagggagagttaatgaagttgaaaaaataaaagtataaacctatactgctgtctactccttgtatgcacaccgtttctgatcctgttctgagaggaatagaatgagtttctgcattgatggtgcctgctgtgcacctgtagccatgcatggtggtgtgttctatcagggtcttcatctggcacagcaatggcagatggaactaccagctgactgcgtctgtagaaatccacttccatcttccaggatccattcaacaattgtaggaatcatttcagtaaaccaaacacaagagcctcaactataactacaagtcctccaggagaggagaacgctgtctcagagggtgcattcctactggaatttctcttctctttgggacaaaccagcccagaggaggcacaggggctgtgtgtcatctggtttcctagatgaggtgtctcctcctcactgtcctgagattttgaagaaactggggagattggtgcagacactccttggatccttacaggaaacttccttcagaccacacactcctcaatttgttcccaagctccaaagtttctaaagtcactgtctaaagggcccacagtgtttttgtggagtggtggaaaagctctggggatggaaagtggtggtggttgcaaagcattctgaatgtacttactgttgctgaatgcacacttacaaatgattgaaatggtttaaaaattgttcattttgccataataaaaatactgcacactctggaggaaagtaaacctagtttaattttgaaattgttcaatggataccaatcaaagaatagtgtagcaagcaccatttcccctctcgctatagcagcaactgatccccttgtgctcttttggactctctcccctgctctctctctctcaataataagcaatgctcttctctccagtccaagctcacacttccccagttgtgcaggaatgcctattgtaactgttaatttatttccaggcagagtcctcaagattcctctgctcatattctgttctcagctgtctggagccagcatgacaagtgagccaagatcacttgtcatgagagacttgtggaaggttttgcaaaaagttccccaagaaaaaacaatgctcattgttgacagcaggtccatttccacacagtagggccatgctgggtgtgcagtggggctgtgcacactgtgcccacaggccaggctctgcactgctgactctgatcctgtgcttggtaggaccttgtgcactgctgagtccactgcagactcgaccctgaatgggaaggtggttcctagctgctgggcactgagtctcatagagggacagatggtattgaggatgcccggcccctgatgtacataaggggacaaggtctgctggtagaacaggaagatgaaggaacctgtggctctaaaggtggggtctccagccctcagtctcagctgcccatggcctcatctgtgtgcaccttgtcaatccagaccatgtgaattagaggtgaagggaattgaaggactttcccattttctcccattttctctcttggttacagaacgcacccttccacatatactgtattagagcctgtgctctacaaacatacctgacactaaattagtgacttttgaaagtgcagataggtacagcaaccagtccctctggagacatttcccataacatgaaccagtgaacccatctctgaaagccctcatgttttaaaagacaagatttttgaatttcaaggaaaactaaacctttgaaaaaaacatgattcaaaagagaaccttgccactttccattcctgcttgggctgcagtgaggacagatgcagcaagtgcttctgatgtctgtgtctgttcccctgtgtggacgcacatatccaggcgagtttcagtgaggtaggagacttcggcagcattggccgggctctggtttgcttctggtgctaacggaacatggaagagaggacaaggtagcgtgtcctgaagatcacatatttcctttttgcaggaagtgcctgggctcctggagtgttctcagggctttgatccaggccaccggctccgcaatcaacatcactgatatttcagcaggtcattgacctaattccattttagtgctatctcaaatggaaacattattttcttgtaactattcatatagcaacatagcacttaaatatctaaataacacacacagaaacagtagtctcaaatgcaaagctgtcacctccccacaccacacactttctcacccgagcccctgagcccacccttccctcggccccccctctcctgtgctgttagaaatctctgtcttctaacagggacagtgacacaaaacagccccccctcccgcccagcactcacaccgcagagcccctagtccatctcctgagggaacgtttacgtttctattctgacagagagaagtcgccgtgaatggagtctttaccccaaacccaggagtttctgaggaacacatggggtcagccactgtctgtgtggggaggcttcacctcagggaggcgcccggctctgggctgagggggactcaacgtgcactaaaaggcaggactaaggcaagtcccgggtcacagtgtgagggacgcacgcgccctgaggaggggtccctggtgctaggcctgacccaattctaaccccaggcacctttcctcagctcctgtggccctgggacacctccctaccctgcttcccatgaggctggtcacagctcttgtgagcaccgcctcctccatgtcacactttttctgtcaacattttgaggagccagttggttttctcctcattccatgttcctgtcccacctgcctgctgggggtggatttatttcatgtatgaggtttcctcagcctgagccacagctgcctcaaggacaccaaccctgtgggacactcctctgggaaaagcaaacaagtgccaagaggagcatctgaagctctggtgtgggagatgtcctccaccctgggtcaggggagtctggaggggatgagaagggaccaggggcctgggattgagctgtgaagggaaccaaaaggcaggagggacagggcaggggctgtcagctatgactcaggggaggttcctgggcctcaggatcctccctctgaggccaccagggggcgggggtggcacatgcctggacctgggaggtccctgctgggcttcaccctgggtgggtcctaggagctccttcctcctaagtccccctaaagagacagaggcattctggggtcctaaatctgtcatgcccccataaatgcatttctacgagggccaataaatgaactccaggtttatccaagcagcagcttcaggcgtctgcagacacagagcggggaggaattagccaacctgaggcaccctagaagggctgaagggggctgaaggggactgaagggtccctgtggggcctgtggtcctggggaggggagagctggggtgtctcccagccactctgggccctgtcctgacacttctcccacaaagaagggaagggaaatcctgggaccccacagccaggaccaaccgtgaaccacaggacaggaaggacagggacccccaaggctggctccatttcccaggcactgtcatgggctgagtctcaggaaatccaagtcaaggagtttcaatccccctggctgagccccactgtccaaggaaacagaagtctacgggcccaggcccaggtgagggtggggtaagaagaggagcttaggatgcagatttgcatggaggccccgccctcctctgaggcatcagggtaagacaaggctgggggcaggcccagtgctggggtctcaggaggcagcgctctggggacgtctccaccatggcctgggctctgctcctcctcacctcctcactcagggcacaggtgacgcctccagggaaggggcctcggggacccttgggctgatccttggtctcctgctcctcaggctcacctgggcccagcactgactcactagagtgtgtttctccctctttccaggctcttgggcccagtctgccctgattcagcctccctccgtgtccgggtctcctggacagtcagtcaccatctcctgcactggaaccagcagtgatgttgggagttatgactatgtctcctggtaccaacagcacccaggcacagtccccaaacccatgatctacaatgtcaatactcagccctcaggggtccctgatcgtttctctggctccaagtctggcaatacggcctccatgaccatctctggactccaggctgaggacgaggctgattattagtgctgctcatatacaagcagtgccacttaaccacagtggtccaagttcttggggaactgagacgaaaacctgccctgggctctcaggctccctttttgctctgaagatgtttcctcacccagtgcaacgggcttcctgaagcacagccttgagaattcttctccctcagcaactctcttttcccaccatgaaatccaaaggaaacctgctctgtggtttctcatccaggacagggacagcttccttttgcttgtgtgttgtggtccctgagtgggtgcaactcttcctagctttttaaattatgggagggtgacaatgagctccctgactggtgcagtccctgctgttttcaggaacatcctcatcctaaatgcatctgaatctcccactgtgtgcagaccaatctggacagatgttattagggggagtttccagaagccacatcttactcaactctgtatccaccacactctggtgaagatgcttttttggtgcccatcctcttgggtaaagtccactctctactcatgacagccatgtgtcccatcttctgaacttgggaaattgccacaccaaaccctcaggctcagggcccacataggagctcagaaagacgcactgggaaatggagaagagatctgcatccacccctcagtggagagacacctaactagataataagataaggaagtaggtttgcatgatgagtctccccttcttatgataagagagacctagagacccccttctcaggtgtgcgctcagaggcagaactctgaagcatctccaccatggcctggacccctttcctgctcaccctgctcactctctgcacaggtgctgcttcccagggctcaacccccacagcaccagggaacagcctggccctgactttcagctcatcacggcagtgatgcagggtatggcactctgagaatgagaccctcatcttcagactcacctctcctgtcctcgcttgcaggttttgtggccttctctaagctgactcagctgcctgaagtgtctgtggctttgggacagatggccaggatcacctgccatggagaggacttagaaagctattatgcacactggtaccaacacaagtcagtccaaacccctaatctcattgtatacaatgatagaaagctgtgctcagagatcactgagcgattctctggttcctgctcagggggaacagccacactgaccattactggggctcacgttgaagacgaggctatttttgtttttctggagataaaaacacattcatagtgacacagacagatagggaagtgaggcacaaaccccatcaccatctgtatcactctctttcttaagccccaggagtattgtggacaaagtcgtgagcagggttagcccagctcagctggatgtgtgaccccgaggcacctttcactctagtcatccaggaaggctctacagagggtgggtcaggagaaaatttggggctgaaaactaagctgtcctggtgttgtttagctaggtatgaattggcttaagatgacctgactggtaggacagtcacagcaagataaccattgagtaatcatgttgcctggatttccttttgtttaatgaccaaacctaaggtagctctctggtccaaaatgccctggattagtcccctggactcctcattctttaactgagacctttgatcccagctgtcatggcatcatgatgtcgtgaacagggaagtccattgtaatggcaactgtgacatcaggggtcatttacccactatctacccaaggccgcagggaatccttggcttctcacagctttttctcaccggaaaatgccattgagtgcagagtactgtgtcttccaaggatgtgccccctccataatgtggtttgggagcaatgattgcctgatgcctagattccaaagccatgctttaattcaggatgaccttgaagtgcctcctgctgagtgctcaattgtaacacattcccagaagagcctcccacacttattttctgggactatatacccgaaccctactgcatggaattcaacctctcagagtaactttccaagaaacccaaaaattaaaaactaaacaacaacaagaaaacaatatagagagaagagtatcaaagaaaagcaagttgtacaaagagagaactctggagtcttcaaatattaataagcatcaagcagcacatgtgtggacggaaactccattttcagacaaacagcagtccaaagacactcgcgggaacactccacagagcattctttctctctctctctctctctctctctcacacacacacacacacacacacacacacacacacaaacacaaaatatgaatcctgcttgttcctacagtcacagaggaaaggcctgagttaaggagcatgaggtcgaatcctcggaacagctttgcctcagtcctggagaaaatgtcagcctagacaataggctggtctggtctcaactaagtaagttaaaaagcaagttttaaaaagtaccaagtttccgagtaattatactaaatccaagaataaaagaccaaatagacagagaagtgcaagtatattctaaatccaacaaggaaaaactcaaaatgtctagcacctatcagatttccttgcaagaaccaagaaaatacatgctataaaaagcagaaaagttcatcagtccaaagtctccctgaaattgcacagatgatagactttgtaggaagaatacaaaagcgatacttataactatcttccacttgctcaagagggtacgggattgattgaacatgttaagtggagacacggtagacataaaaagatcaaagttgaacttacagaaattacctctaaaatgtccgcgataaaaataaatacataaataaataagggccaggcatggtggctaatgcctgtaatctcagcattttgggaaatcatggtagaaggattatttgagcccaggagtttgagaacagcctgggtgacacagggagaccctgtctctacaaaaaaataacaaaatcagatagatgcatggtgcacacccatggtcctagctacttaggaagtggtggaagaattgcttgagctctgtaggtcaggatggcagtgacctgtgatcatgccgctgaactttggcttgggtgatagaatgacaccgtctcaaaaaaaaaatgtctgagaataattgtagattagctcccgcaaaataatagattactgaacctgaagatataacaatgaagctcttcaaaatgaaacaccaaaaaagagaagataaaaaattacactgagcatcaatgagttttacgacatcttcaaggagccttaattgtataattaaatgaactaaaggagacaagattggtggagggagagggagggtacaaaaaccacttaaagaaataaggaaaaacgtgcaaaatttggtgaaaactataaacttatgatttcacatagtttaacacaacccagacacccacacacaaacacaaacacacagacatcatatacacaaaaaaacacacacataaagaaaacatcaacacccgccataatcaaattgcaaaaaaaaaaaaaacaaaaacaaaaacaaaaaaaaactgtgatggagaaatgctcttaaaagcagccagagagaaaagacatgtttgatgcaggtgaacaccataatgatgagagtagctttcccattagaaacaatacaagcaagaaggcagtggaggtacattcataaaactttttaaaacttactacgcacagcattgtacatattcagtgtaatccctatcaaaacaccgatgtcattcttcacagaaatagaaaaaaaaaatcaatcttgaaatttatatggaattacaaaagacactgaatagccaaagcaatagtgagcaaaaagaataaagctgcaggtgtcacaccacttgttttcaaaatatgctacaaggatatagtaacccaaattatactatactgttttatagtataaaacagacacagaccagtgtaacagaataggaaacacagaaataatccacatatttacagacaactggtttttgtcaaaggcaccaataacatacattggttaaaagacagccttcttggtgctgctgagaaaactggacattcacaggcacaagaattaaaatagacctcgatctctcaccacatacaaaagtgaattcaaactggattaaagacttaaatgtaaaacttgacactactaaactactagaagaaaacacagggaaaatagggaaaatgcttccggacttatgtgtagacaaagattttatacctaagctttcaaaagcacaggcgacaaaaacaaacatagaccaatggagctacattaaactaaaagtttctgctcagcaaagaaaacaataagcaaagtaaagagacaacttgtagaacaggagaaaatatttacaaactgttcatctggcaatggattcacatacagaataagacaataagacaagaaagcaaaacaattcaacagcaaaaaaaaaaaatgccaaataataccattaaaaagaggtcaaagaatttgaatagacatccctcaaaagaaacatacaaatggccaaagggtgtattttttaaaatgctcaacatcactaatcatcagggcaatgcgaatcaaaatcacagtgagacatcatctcaccccagctagagtgactaatatcaaaaagacaaaacataacacattctggcaagaacgcagtgtaaaggaactcttatacactgttatatactgttggtgagaaggtaaattttaaattaatacggccattatgaaaaacatgatagtgtttcagaaacactaaaaatagactatcatcatacaatgcaataatcccactactgggtatttaatcacaggaaaaaacgtcagtatatctaaggaattcctgcactcccacgtttactgcagcactattcataatagcaaagctatagaatcaacctgttttcatcaacagatgaatgcataaggaaaatgtggcatgcatacacgatgaaatactttccagtcataaacaaaagaatgaaatcttatcctctgcagcaacatgatggaactggaggtcattatgttaagtgaaattagccaagcacagaaaaacaaatgtcacatgttctctctcatgtgggagctaaaaaaagctgatctcatggaggtatagtgtagattaatagttaccagagaggctgggaagggttaggggttgtggggatgaggggtagttggtcaatgggcacaaacatacggttacataaaagcaataaggtctattgttgtatatcacacagcagagtgaacatagttaacataatttattgtacatttcaaaatacatagaagatttgaaatattcccaacatatagaaatgacaaatgctcaaggtgatggatatcctaaacactaattcgatccttacatactgtattcatgcatcaaaatagcacgtataccccataaacatatacaattataatgtatcagtaaaacatgttctttaaattaaaaaaaactgtcaattctgaattctttactcagtgaaaatatctttcagaagggaaggcaaaataaaatggttttaaccataaatatacttgcactattcatgacctgcagacacacactatagaaaataataaagaacacttctcagatagaaaatcatactaaagatgtgactctgaataaagaaaacaaaaacatcaaatatagtaactacataaaaacatatagaaatggtaaataaacatagatataaacgacttaaattacattacaaaacaactagacttaatagacaactatagaacagtccatccaacacagcagaatacataataatctcaagtgcatatggaacactctccagggtagaacctgcaaaaaaaaaatgagtaccttaaaaaaatagaaaatctataaagtatattctttgtgttacttcactcttgtattgctataaagaagtacctgagcttgggtaatccataaagaaaagaggtttaattggctcatggttatgcaggctctacaggaaatctggtgccagtatctgctgctggtgagggactcaagaagcttacaattatggtggaatgtgaatgaggagcaggcatgtcacatggtgagagtaggagagagagaggtggaaagtgccacactcttttaaacaaccagtctcacatgaactgggagcaacaactcattgtcatgagggcagcaccaatttattcacgaaggatccacgtggccccatgacccaaacacctcccactaggcccacctcaacactggcagctacatttcaacataagatttggatgggacaaatattaaaagtatataattccacccctggcccaccaaatctcatgcctttctcacattgcaaaatgcaataatcccttctcaataatcccccaaagttctaagtcgttccagcatcaagtttaacatcctaagtctcatctgagactaacctcctgtcacctatgagcctgtagaatctaaacaagttatttacacctaagatgcaatggtggtacaggccttgggtaaacattaccattccaaaagggagaaaacaaccaaaagaacaggccccacacaagtcctaaacccaatggtgcagtaattaaatttcaaacttccacagatctctagggcatgaaaagaattcagccaagctttttactaaggcatcacaagggtgaactttgctccagttcccaataactatctcattccatctgagacctcagcagcctggacttcactgtccgtatctctatcagcatcttggtcacaaccagctgaccagtccccaggaagctccaaactttccctcatctgtctgtcttcttctgagccctctaagctcttcaaacctgtactttttacccagttccaaagctgctttcacatttgcattatccttacatcaacaatctacttttggtaccaattttctgtgttctttcattcttgcatttttatagcacctttatagcaccgctataaagatgtacctgaggctgggtaatgtataaggaaaagaggtttaattggatcactgttctgcaggctgtataggaagtatggtgccagcatctgcttctggtcaggcccttaggaagcttacaaaaatggtggaaggtaaagtgaaaccaggcatgtcacatggcaagagaaacaaaaagaagaaagagagaaaggaaaggaaaggaagagagggaaggagggaagaaagaaagaaggaaagaagcaaaaaaggaaaggaaagaaacaaaacaaaaggaagaggaaggaaggaagagagagagagaggaagaaagaaagagagagagagagaagagatgagacgagacggggggggagagaggcagggaaggagagagggagggaggaggaaggagggagagagagagagtgaaagaagaaagagagaaagaaagaaagagagaaagaaaaaaagaaagaaagagaaagagagagaagagtggggaagtgccacactcttttaaacaaccagatcttgtttaaactagtggttagaattcattcgttattatgaggacagcagcaagccaatcatgaagggtcagccctcatgacccaaacacctcctactaggcccacctcctacagtggagttcatcttccagcatgagatatggaaggaataaacaatgatatcatcctctgaacactgatattgaaaaataaaaggtattatatgagaacactgtgaaaagctgcataccaaaaattagatgaaaagaaaaaatccctaaaaacataaaaactactaaactggctcaaggaggtatagaaagtctgattaacactataacaagagtttaaattagtcattgaaacctcccacaaagaacggcccaggcatgaagggtttcattgatgaatattatgaactgtttaaggaattaataataattattcataaacccttccaaaaatataagaaaggggaacatgagcagctcattctatgaggccagaagtatgctgatacaaaaacaaaagacatgaaaagtgaactggagcacaacagcctctatgaaaacagatgcaaaacaaccacacttcaacaaaatactagcaaaatataaaaaggattaaacaccataactaactagtattcatccccaatattcaagggattcttaacctatggaaattaattattttaatgctccctattaaagaataaaaccacatggttatttcaacagtcacatcaaatgttttcatgtacgcagacaggacttcctgttgttttcccattcctgttaaagcatcataaaaggcacgatttgtggtgctactggatggggtgctacttcatgcaaactggatatgtcatgtccaaccatgaatatacttagccataaatgctaaaagattgtaatttggtgtcagagacttggtggtcagtgaccacttccttggcaagtggtaagtacagacatctgaaaggataactaggatttaggtaggtattggataaggaggtgagttacacacagaaaaagtttcacttaaaaactcatagacgcttgaacacagaagatggctcaataggtctgagaaataaacaaagtccagaataactggagctgaatggaaacaaggcaaatgacatgaaccatctgtttctctctcgacaactcactggggcattgtctcctccctataccacccacgtggattgtaaaaacatctgttcttaaaactttcttgtgcatcatgacagcatgtagcacctgaatccagctcagttaaatgagggcaggacagtcaaccacaaaacccaggtggcccaggaagcacatcagggagacaagaccttgctgtcaaaagcagaggaagtgagattttccattgtggctaagcccagagcatatgaaatttcaatgggtacacaaaaaccatatagggtttggttaagctgcagatgcagtctttgcaggtttgaatggggccccagattctccatggcaaatagcctccagttgaggttgattgatgctggtcctccaaggaacacactttgggtggcttagctcctatgcaccctcctcactcatgcacagctgaaactcacctacataacgcaccttctgagaagcataagtgacctatttctcctccactaatgtgtctcagtcccttttactaaaaaggaatatctgaagttgggtaatttgtaaagaagcaaaggtttatttgggtcatgcttctgatgtctgtaaagttcaacagtgggcatctgcatccagtgaagacctcaaactgcttccactcctgacagaaggtgaagatgagccggtgtgtgcagaaatcaattggaaacagaaagcaagttctttcctaaaaatactgcaggagtttaatgatcatatttacaaagtgtttaacacagagcctgacacaccctagctgctcatgagttggcagcaattattgctgatgtcattcatgaaaattggacctcagatggagaaactgcagtgcagagagtttgagaagtttagggacaagaaagacttagtgacttaaaatcgagttctaggaactgaggagagcatccctgggcattttactgccatcttttccaatgtctcagaaactgtttcaatgtgacgtcaaccagagaggaaagcagaggggtttgcagaaccaggggctacaacttcatccacgggagagtgatgtagtaagcgggtgggaaggggcagctgagctcatctgaagggtgtttaaggttttctggcccagggatctttggccatctctccctgcccagggcctcattcttccactgaccggcaggagctggagagtggcttctgagtctggttagagatcccagcagcacccagagggggaagacattggagagacgggtctaaggtcactggagacactgtttgctgcctagagggctgcgacaggctccttgaaaacaaaattcagacactttaggggaagaaaacacaggatgggaaggctcctcaccaggggattgtggataacagagaccaaagcatctacaaggagcccagccctactggaggtgccctgaacacagagatcctaggggtgtctgtattattttgccagggctgccatagcaaagtagcacagccctatggctcaaagaacacaaatgtattttctcactattctgcagatgatgttagaatctaagatgaaggtatctacagggttggctccttctgagcactggagaatctgttccatgcctctcccagcttctgctggctgcggaggtgtttgctgttccctgccatggagggaaatcaccccaatctctgcctcacattcaaatggagtattcctcatgtgcgtgtctgtgtcacagtttcccctttttataaggacatgagtcgtgttggattgggtacgtactctgctgcagtatgaccttttcttaactaatttcaactgtaatcaccctatttaaatataaaatcccactctgaggtccttgcagtgaggacttcattatacaaatttgaggggactgaaattcaaattcctaacagtgtgtctgccatgactcaggcctctccttggggctctgcaggtgggatgtgcaccaccaacctctcaggtggggcattacctgacagcccagaaggaccccaggccctctgaaaaatgacgtctctttcatccaccttgagggacatgttttctggctgtccttctcatcctttgcatgctgacatgggagacatcatcctctgctttttaaagaaggactccttcaccttcccaatcaccccaagtagatgcccatgctggttccacagaatcaaaccacggtgggttacgagttatattagccaccagctgacaatattccctgaatgtccaggatccacccatgctctctgaccatcaccagagtgagcaaatctctgatatgtgggtaagagtttctcccatgggctcccagccgggctgtaagtgaggcaagaccccttcttcagtgcacggggctcagtgcagctgcctccctgaccaagtcttcctgggacactaagcttatcagtttctctcccccagggacagtttttggttgtcctaagcctagctcagctctgctatgaactttgcatcctaagagcccattaaacacccccttgtgcctcaatggaataacctggagtaaatagtgtgaggtgcccctgctttctgctcccagggcctcttctcctcggtggcaccagcactgccctattgaccagcaatcctcacctgcccattcaggcctctacactgcctaccgtgaacagtcacagatcacaaactgattgccaaatttgtgcagatcatcttgacagtttctgtggaactgggtgccttctcatagaaccaggaagtcacaagccaggccagctctagagaagcaactgggggagtaacatgcatcacagcgcctggacacaacaaagggattttgctgtagtcctactaggacacatcctagtgatgtctctgagaaccagtcttggtccctgcaacagaaagcctactaaacaggacagtaggctgcaaggttgggcacaatttgtgccgtgtgtgagccatgtagattgtgcatgtgtgtatgtgtgtacatatgtgtacatgtgcatttagtgttgcaaggaagggttgtgtcaaatgtcccaactcaaaacttttctgttttcctaagttatctgcttctatctttactacctttgtactatcataagaataaggataatgattagggttgaaataggagaaggaataatgtttaattattcattcttatgtgtttaatacatatcaagcactcttcaaaacaattcatatttattaaatcactcaatacgaactactccatgagccaaatattgtcattatctctccatttccagttggagaatctgtgatacagattttgacacatgggaaagctaaggcaaagaaaggaaaaggactttgcccgatgtcagaactagaaagtgcctgacccaggagcagaacctgagtcttccagtcccagagaccctgttctttaacaacagcctgtgggcctgtcactgtgctttaaggtaaagcactgacatctccctaagactccagaaagttctctgtactttttgaatcaagtaactcatacttgcagtgatttccaatgcagtaggaattctctggtgctgaggagtctactaggaatataatttcaatgcctttaaaatttttcagtagccacattttaaaagtaataaagaacgggtggaagcaactttcgtactatattttctttaactgagcttacccaaatattatttcaatatgtaatcaacataaaaatattgagatattttatgttattttcctacaacctttttgaaatccggtgtgttttacccccacatcacatcttaacttgaactacccacattttaaggactcagaagctccctgggactcatggttgctatactggacagagcagatccacatgaatgatgatccatttggatcacagcccctgcagtacttacttagaaccatcttggggcaatggagagtcctatgacccagagggcctccttagggaagaatggctgttccattttccaaccaaagtagaaatatggcgggctctcagaaaccagggaatttttacaatgtgtttcacacttcttcccttctcaaagacattgactataacttccagttcgaagataaatctgagccatcaaaggcatttttttctattggtcagtggaatgaatggcaatggtccctgtggattgtgctccaaggatccctttctgtgggaagattcttacaataaaaccaactaaaagtaggaagttattgtttatatgtagatctagatgaaagggggctgatcatgaggaatatagtattgaaggtgagtgtgttgctattcttcacaaagggctatttttgcctaactcacaagcatcaatcatttttatgaaggtgtattttcccagagtggtcttagcaagttacatccaacgctgtatcaggacccacaagcaagggtgtcagaactgacctgcctgagcggtcagcaggaaccaatgtggagactctgaggtctccacaccaccaaccatgtccaacctccagtcaagtgacaggaggagtggaagcattggttgggaagggcttggaggagctgcagtgacatgctcagccaagtacaggagcaggcatattggtgtcatgtgacctcatcttatctcagttatctcttttcaccaaactccaaggtgcaatgtgtggaggcatctgtctgtacccatggacaccttgggcttcacacattatttctatttctaatgaaccagtgttttgttaatgaattcatttcatcacatccttagtacttctaggttggaaaagcaatacatgtctctaagatattaggtaggaaatattctcccgccactcgtatttattaaagttaaaatgcttcagtatctaatgtgacagttgtccaaattcaatacccttcaccttgttagaaatggaatcctgatcctaacttgtctggagaggaggctggcatgaggagcatgaccacacatctggatgtccccagtgtcactgctaacacacgctcttttgttacttgccgtgaagggagcagagggagcatccacacctttgtccaaaggacttggaggacagtgcacctgattaaaaaatgcagggctgtgataagtgggttccgggtcctggatgagggaagagaagatgaggaggcatggggtaggaggcagggcagggaggagctgtaaggtcaggctctgagtatgggtgaaatcctgactccactcactactctctgggaggatttgataaatcttgtaacctcctgatgttggttctcccatcaataaactaaaggagaggtcgtgtcttaagcgtatgcttgctgtggggctactgtgaatgtgtggttgaggtggtgcctgcaaaacactctccaaagggcctggcacgtattaatgtctcaaaggagtcattctgcttaagctcgtggaggatgactttcctcctgtgtgcactagagggccttgttttgaggaccccagtgacttccctggtagggctcaagcacaaagggcatgactgatgcttcctctgaggccccttctattgggtaaaattcatgctccactcatgacacccacctggcccttcttctgaccttgagaaattgccaatatgaagccctcagactcagagctcagacagtacctcagacagacatgctgtaaagtggagagcagatttgcattcaaagctcctcccttcttgagcttcaagaagaggataagacaggagctcatagtgtccaggttccactgggcagtctcgaatagagctcttggaagtccctccaaccatggcctgggtctccttctacctactgcccttcattttctccacaggtcagaacatcccagggaattcagggaaatgttttcactgctattttcccatgagcaccagtcctcaggggcattctttccagttcttctgtgcattcagcatcattcatgacattctgtttacaggtctctgtgctctgcctgtgctgactcagcccccgtctgcatctgccttgctgggagcctcgatcaagctcacctgcaccctaagcagtgagcacagcacctacaccatcgaatggtatcaacagagaccagggaggtccccccagtatataatgaaggttaagagtgatggcagccacagcaagggggacgggatccccgatcgcttcatgggctccagttctggggctgaccgctacctcaccttctccaacctccagtctgacgatgaggctgagtatcactgtggagagagccacacgattgatggccaagtcggttgagccacagtgacacagatgaaggggaagtgaggccaaaacctcccacctcccctttctcctcagggactcagagtcaacagccctgggttcctctccagtaccctgagacctctgactctcctccctccaagacacccctaggcagaagcagatgcaggccatgactgaggccattttgaaaactcatctttctgtttcctccacaacagcctgtggggaccatgctgggagagaccagagcagcccaggcaggaaaaggaccttgagagagtggctaggatgagatgaccgtgtcccagtgtctcattgtgccctgtgctctattaccaggctctgccccaggaaaggacatggatcttgacctgtcagccatcatttatgagagttcaatttttacattttttaaaatataaaaactacaatctccaagatgctaggagcaatttcactgagtctcatcatggaattctgacctcccccagcatgtcccctgttcctacaatctcctgttcaagaccaactcaactccattacccagaccagctgctggatgatcaagacagggctgtgagagcctaagaatctttaaggtccacgatgagaacacgtcaagaaggatttatgttggaacttccttccccatggatattcacatcaacagagaagatatctgagttcttgcctacacctatgaatacctaagacatgaagtgtgtgtgtgcatatggtgtgggcagcacttcctcactcaacaccagagagtgtctgaggacactgggtacagacatggagacagggcatatttttatacactcaattaagccctcgtccttctctgctcaccaaggagccacccaacaaggccacagcaggaagagaagttgatttccatgaagagccttccctttctaagagtcctggaaacccactgtctagttgtggaatcagaggcagagctctggggcatctccaccatggcctggaccctcccctgctcaccctcccgactctctgcataggtgcttcctcccagggaataagccccatggaaccaggggtcagcctggccctgaccttgagctcagtgcagggagtgatgcagggtgtggggctatgggaatgagaccctaattctcagtctcacgtctcctgtctcctcttgcaggctgtgtggcctcctctgagctgactcagctgcctgcagtgtctgtggctttgggacgtacggccaggatcatctgccagggagatagcataggtgactctgatacaaactcgtaccagcagaagccaggtcaggtccctgtgctggtaatttatggtgacagcaaccagccctcagtgattcctgagcaattttctgactgcatatcagaggacatggccaccttgattattaatggggcacaggatggaaacaaggctattactgtcgctcggaacagcactgcttctcatctcacagtgacacagcatacagtgaagtgagatgcaaaccccttcccatctatgtcattctctcccttcaaccccaagaggactgtggtcacagccatcagcaggtctggcccagttcattcagatttgagacccccaggctgcccttccctccagtcctccaggcaggttcattagatggtaaatcaggggtggatacacaactattaaatatcatcatgttccaatttttcatgaagtagaggaatgattgaacatgttaagtagaagcacagaataaccaaaaaaggactaattgagcttgtgtacagctaataattgcaatgtctgtcaactttaaaaacatactggatgtgattaacaacagattagattatgtaaaacaaaagattagcaaacttgatcatgtagcactagaaaatattcaaaatgcagcacataaagaaaaaacaatgacaaaaatgaaaaagcattatcggatattcataaagaaaatgaaggtgagttataggacaacttcaaacagcctgaggttgactaggagtaatggttcacgcctataatcccagcactttgggaggtctaggagggaggatcttttaagactaggaattcaagaccagactaggcaacatagctctataatttaaaaaaaaaaaaaaaacttaaaaattaactgggcttcgtggcttgcacctgtagtcgtacctacttataaacctgaggcagtaagattggtagagcccagaaattcaagactgcagtgagtgagctatgatcatgccactggactgcagcctgggcaacagagcaagttcctgtctctaatatagggtctcaatctgtcattcaggctggagtgcagtggtgcaatcatggatcactgcagcactgacttcccaggcccaagtgatcctcccagctcagcctcccaagtagctgcgaatactggcgtgcaccaccatgcccagctaatttttgttttttctggagagactgggtctccttatgttacctaggcttgtctcgaactcctggactcaagcaatcctccagcctcagcctcccaaagtgttgagattacaggggtgagccgctgcacctggcctaaaaaaaaattttttttaatacaacaacctaagtatgtataattgacatccatggaatgtaaaaggtatgggtgggtagaaaagaatatttgaataaataatagtcaaatgtgctccacatttggtaaaaaccaaaaactggtatatccaagaagttcaacaaaactgaagcacaggaatcatgaagcaaatgactccaaatgacataatagtcaaattagtaaaatctggtgatgaagagccacttaaaagtatgattctaagagtacatttctcattagaagcaatgtaagcaagaagacagtggagcaataattttaaaatactgaaagaaaacagctgtcaaccttaaattctttatccaacaataataactttcaaaagtggaggataaatataatgttttcagacatataaaaacttacagaattgattactatcactcttgtcattagaaatgacaaaagacacccctagacagggggaaaatcataccaaattgaaatatgaattcacacaaatatcagataatgcaactccatttgaatatataatcacatttgaagacagattttaataagtgatatatgtatcacaaagcctaaagtaaacattaaacttttttataaaagaattatgactagtaagctgtattaggattctccacagaaacaacataaatcagatatgcatgtatgttatacgtgtgtgtatatatatacatatgtgtatagtatatatatgtgtgtatatatatacatgtgtatagtatacatatgtgtgtatatatacatgtgtatagtatacatatgtgtgtatatatacatatgtgtatagtatatatatgtgtgtatatatacatatgtgtatagtatatatatgtgtgtatatatacatatgtgtatagtatatatatgtgtgtatatatacatatgtgtatagtatatatatgtgtgtatatggtgagagaaaaagaacaagagagaaactaattttgaggaattggatcatatatttgtggtagctgacaaggatgaaatatgttggtcaggctgaaggctggaaattcaagtaagagttgatgttgcagtcctgcatccaaatttagcaaggcagcacttcaggaaacctccacatttgttctaaaaacattcagctcactaaagagtcccacccacattgtgaagagaaatctgcttatacaaagtttactaattaaaatgttcatcacatctgaaagttatcttcatgtcaactcctatactggtatttgataaaatcaatctggtgcatagcctacccaatctaacacttaaaattaactatcacttaacccagcaaggaaataaaaagataatttaaaaaatcaatcaaaaaaggagacagcaaaagggaaagaaaactaacgaacatatgggacaaatataaaataaagagcaagaagatccttccagctcagcctactgagtttctgggactacaggaaggtttgtagttctccttgaagaggtccttcacatcccttgtaagttagattcctaggtattttattctctttgaagcagttgtgaatgagagttcactcatgatttggctctttgtctgtctgttgttggtgtataagaatgcttgtgatttttgtacattgatgttgtatcctgagattttgctgaagttgcttatcagcttaaggagattttgggctgagacaatggggttttctagatatacaatcatgttgtctgcaaacagggacaatttgacttcctctttttctaactgaataccctttatttctttctcctgcctgattgccctggccagaacttccaacactatattgaataggagtggtgagagagggcatccctgtcttgtgtcagttttcaaagggaatgcttccagtttttgcccattcagtatgatattggctgtgggtttgtcgtagatagctcttattattttgagatacgtcccatcaatacctaatttattgagagtttttagcatgaagtgttgttgaattttgtcaaaggccttttctgcatctattgcgataatcatgtggtttttgtctttggttctgtttatatgctggccacttctcaaaagaagacatttatgcagccaaaaaacacatgaaaaaatgctcaccatcactggccatcagagaaatgcaaatcaaagccacaatgagataccatctcacaccagttagaatggcgatcattaaaaagtcaggaaacaacaggtgctggacaggatgtggagaaataggaacacttttacactgttggtgggactgtaaactagttcaaccattgtggaagtcagtgtggcgattcctcagggatctagaactaaaaataccatttgacccagccatcccattactgggtatatacccaaacgactataaatcatgctgctgtaaagacacatgcacatgtatgtttattgtggcattattcacaatagcaaagacttggaaccaacccaaatgtccaacaatgatagactggattaagaaaatgtggcacatatacaccatggaatactatgcagccataaaaaatgatgagttcatgtcctttgtagggacatggatgaaattggaaatcatcattctcagtaaactatcgcaagaacaaaaaaccaaacaccgcatattctcactcataggtgggaattgaacaatgagaacacatggacacaggaaggggaacatcacactctggggactgttgtggggtggggggaggggcgagggatagcattgggagatatatctaatgctagatgacgagttagtgggtgcagcgcaccagcatggcacatgtatacatatgtaactaacctgcacattgtgcacatgtaccctaaaacttaaagtataataataataaattaaaaaaaaaaaagaaaagaaaatgtctctagacagcttggttcctgagctgggaatcaaccgtcttttctctccctttcaacccagagtgtggcaggcgcgccccctacaggcagctaaaagagctgactgagatgccgtctccatagggagggatttgggctgagaatttgggctgaggattttcccatgccctccctggcaggctggtcccaggacactcagaagacttactgttacaggtccagagcatttctcgtcttccttttctctctccttgccaagtgaccttggaattgttcctccccatctcagccccttcccttttgtgttaagtgcagtttgcagattttgtgttcctaggtcctgtatctgtagaattttagggaaagcagtgctggtcacccacatggaattcaagacagcgagcccaggaccagaaacacagacagcagtgggggtccccacagagcagcatggtgggcaccaggtggaggtaagaaaccaggaaccactcccctgagtgtcttcagccccaggtgaactagggaggggtcagtgggctgggctcaacccaccggggactctcctgtcactgccccagcagcaccatcctggaagcccctatatgtgctaagcagctgccaaagaacttgattaattacctgtaaatttcccttcaccacacctgaccacacatgactcctgcccccaaattactaatttattaaaatggcacaattagccgaaatggcctgaatccaggacccctttcaggtttgccgctgacctctcaggtcctcacacatgccagactctttccacaggggcctgactccactgtttccaacacaaatcccaggactcatttttctctgtcagtcctgacagcagttccagagacacttccccattaagatgtccccaggctcttataatacaacctgtctgttattttctgcctaaatctttttaattatccccatagcatttacaactgtaggaatctttgcctattgttaattttattaattgattggtgttaaatatttacttaattggtcatggatgcttttttaccacagaatcacacataaaaaacagacacaaacagctaagggtgtatttctcgctgcaataatacccaccactttcacgaagacaccagggtctttctcactttttgtcccaccatccctatgatattggctttattttcatccctgctgatgtgtgacctcagggtggctgctgcagctccagctatcactcccatattcaaggagaaaagggcctcatgaatctagtgctctttcacaagagcaaagctttcctaagaagaatttcacccactgatctcacaccccactgatcaggcctgagtcacatggtcaatcccagctgagcaggacctgggaatcacaggcaccagtcttttcggtgaatatagaagacagtgctcaggtggaaggtgacagggactgtctgctgggtctgcaaacccagttttcccgcacagccaaaccagcacgatgaacaactcacttcaagaaggctgtgtcttgttcctgctgaattcaccgcatggaacgtgtcccagaccacagtgggtctggattaacatttgatgggtggatgttcttctgtctctgactttggtgcaggagtcaccactgtacgctggtcctgcatccacagcggggaccagtaagagccagtccctgagtcctgtgatccccgccctgcatgccaagccctggtattacccccatgaccacccaccgcccagacacatgtgcaggcagcctcagatggaccttcctcctcctcttccaaatattcatgttcatattgtcatgagtaatctgcacccctcgcacctggtattgaggcaggcatgagtcacaaagagaagagaaaaatttcctccattggcaccagcagtctgcagaccagggaatcagggacctgaacagaagattttaattatacacccggacccaggaggcccttgagcctccagcagccagtatggagcagccaccaggggacagaacagagtcacctggcaaagtcacttggagatagggtagacctgggtgacaaggagatgctgacatgcagggagggtcagtgaccacaacctgagatctagaaaggtgtcgtttttctacagcatcatccttaacatcgagtacaaattctccaggctttgtgtttctcagctttgtctctggccaatgttgcatatttgacacaggtgcagacactttgcttccccctacacactggcccactcttctgtgctaaaacgctgtcattgccacaaacgccatcctcccctgtgggcacatgtgtttcatcaccctcctgtttgctctgagagccccctcattctgctacacagcaaagttttctttcagcatctaagctgtacctgaccatgaccacatactgggggtacataggcacagcacctgtgccctaccctaggagctcacagccaaggccaggaacttacagcatctcctgagtctttcaacactccgtgtgcacatgacaagggtgaagtttgattgtggaaagcaccactcagaagcaatggcaggtccctgcatgtgtgccagccttacggtgtcacctgtagagtggggtcatgagggtcactgcactgggttgaaaagtgccctccagagggggagctagaaccacacctaacttctggattttgccacaaaatatttagggacaggacacccctggagtcctcaattacccaagttattctgagccagtattcaacagaggaagtaccttagatctcagaataatccctcagtcgccattgtaagtcagtccctggccatctccacgcaggacaaggaatggccacatgggcaggacatcatactacctggaaaacgcacaaagaattcctctcagagttctgcatggccagatcagctcaggagtgaggccataacacaacctacagtgacgatgtcaacccagatgatgggaccagaaggagaatgagaattctgtgtgctgagggtgggtctttaggggccccctctctctctgtcccttggggctgagcccttctctggaaaccacacagctcctcctgcagcagcccctgactgctgatttgcatcacgggccgctctttccagcaaggggataagagaggcctggaagaacctgcccagcctgggcctcaggaagcagcatcggaggtgcctcagccatggcatggatccctctcttcctcggcgtccttgcttactgcacaggtgctgcccctagggtcctagccactggtccagtcccagggctctgggtccagcctggccctgactctgagctcagcagggcccccgcctgtggtgggcaggatgctcatgaccctgctgcaggtggatgggctcggcggggctgaaatccccccacacagtgctcatgtgctcacactgccttagggctctttcatccctggatctgtgtccaggccaggcacgtgggaagatttacttggagttcagctcctcagtttcaagccttttctctcccgttttctctcctgtaggatccgtggcctcctatgagctgactcagccaccctcagtgtccgtgtccccaggacagacagccagcatcacctgctctggagataaattgggggataaatatgcttgctggtatcagcagaagccaggccagtcccctgtgctggtcatctatcaagatagcaagcggccctcagggatccctgagcgattctctggctccaactctgggaacacagccactctgaccatcagcgggacccaggctatggatgaggctgactattactgtcaggcgtgggacagcagcactgcacacagtgacacaggcagatgcggaagtgagacagaaaccagccacctcggcctggctcacaagacccttccctctctcctgccctgtcacactgagcaggagggagccttccatgtggaatggaagtttccagtcctatccctgcccttatgttcctgagagacgggagcaagttcctgcccacctctaggctcagcttatcccagaataaactgagctagtcattttgatgatcaaatgccagctcccaaaagaccccagaaaccctgatatctaagtagcaccgactctattagtatcaagggagactagccctagggtggaatcattttagtgtctcagaaggcacagggcaatggaaagtgtttatgaggtttcaggatatgcacgtgagcagttaaaggcaggtcttacaaggaaggaacctactagaattggggcccatctgtgacatcatagcacagcctggtggacacagagaagggaaggtcctgaatcaagtcttgatcagtaaatatttattggataagtgagcaatttacataggtgagaactgtgtgctctcttgagcagaacacttacctggataattggttttcaggaattccctgaagcaatgagtgacattctttattgttttcaccctcatccacctgggaaagagtatcctggaaccagcagttaacattgacacagctggtctcggtcctcagcacaaacattcattgcaggctgaaaagtgacaacggaagagaaaggagtttattaaatccctagacacaaacaaatccataagcagagatgagagatgcgggctcagctggcccagtcccacaggggtcattcctcttgtgatggaaatgaccacatgagggtcccccaagcggtgttggggggcagtcatggggaactggcctcccagggctacctgctgcttgggctgggcagaggttagagggatggaagtctggtccagtccttcccagcagcatctccaggctcctcctccctctactggggcttcccctccactccccagaaccatcattgcttcctcatctcctgtctcctccctgccccaaggccctccctgtgctcaccctggctcctccccctgctccatgcccagcctctgcagagcagcccaggcccagagacttgggcagaagcttccgtcccaccagctgcagaaccttccctacagaaccaggccagtccctgtgtctcatatttgtagagatcccaatcaccctcagagatgacgggtgggaaaccagcccacagtgacctaggctgttgggcatatggccttcaagctggccttcaagcccacttggctgcatctccttggccaactccaacatccaggctgggagtctggaatcctagttcccctggcccattcactcccactagggttgcttctaaactccctgggcctcagcttcctagtctgcccactggaagcagcgacaggcattttccagggctgcggtaagggccctggaacaccctctctcaccctctctctccctttctctctctctctctctctctctctctctccccctccccctccccctccctctccctctctctctctgcctctgtttcctcctcagtagtgggaagaccccctgtcaggtgggccagtccatgacatctacagagggagcaggaacctctcctatttcctggaggagagctggggtggaggctgcaacccaggatcatcagaggagctggggtcttcaaggttcctagggaccccttaagcgggggtcagagtggcttcagcggtcttattgctcggtccagacagaagatgtttccagttgtgaaaaacgacttcagggacaacaaaaacagagattcgcctctccagacaccagtggttggtgtgcctggagtactcctcgtaccaggcaggggagagagtcctagacagaggaggttctaagtgtcacctagatttcaggcctcggggcctgtattgggtaggtgatgtcacagtgagttgatgctctgtagccccttccctaggaggtggcagagggaagagctggtggtcctctgaggtgtgagtgagtccaaccctgagggtcttcccaagctggaggtccctgggtgtagacggaagaggttctggtcaaagaggcctggtgttgaatcctggtccatttattcatttggtcaagaaatattcatggaggacccaatatgtgccaggtgccaagccaggtgactggggacacagtgttgagtgggacagttggctccttcactgctagaggtattatattctcaagccgagactcggctctacgattgtatgtcagatatatagcctctatgtgcatgtctccagagactggtttcctggagttccaagtgacagccatcactcacctcgaatgcaaaaattaaaggagcatccaaaaacctagtgacccagataaataatacttaatgcaatattttcaaaaatcaaaattaatgcccaacaaacccacaatgaacaaaatttcaggatctgactcactcacctcagtggttttgttcttggtcctacccacagtcccacaggtgagtgagtacccacagggatgcaaaaccagagtcaggcccctgcaccgccttctgcccggccaccagagccctcccctgggtcttggcctttctcttctgaagagctccagccagttcctcctcaggcttcctctactgctggtctcttctgccccctactggattctccccttacagctgcactccaggcagctggtggaggttaaagaacagaaacctcccaaaactccaccctccagttccaggctggctccacctcatgtccaaaaaggctggtcctccaggtctttgattgctattagtaagtcccaagacacagtctttacaccaagtcgctgtgtgccttgggcaagaaactctccctctctgagactgtgtttccacactggtagaagtagctagaagacctccctgccaggttggcaagtccactctgtgacatctacaaagggagcagggatctcttccatttcctggaggagagctggggtggaggctgcaacccaggatcaccagaggagctggggtctttggggttcctgaggactcctcagagggggatcaggagctgcagagccagcttctaactctggggactcagagatccagaacctttgtcatatccccagccaatactttgtcatcctgtgcctcagactcccccagatcccaagagtgagaagctcaagacgagacaagaaagaccagccagcttgaatttagggatggtggggagtggggagctggggacccctggacctgggggagaggagtctgcagtgcctgcaggtggagtttctgggacctgggggatggagactgggcaggggactgaccagcagaaggccaaggtgggggataccctcagacatggagcagggcagaagcaactggatggggtacatccctctgctttgggagagaagggccagggcgggacccagagagctctgcagaggcaccacagaccctcagcagggggtctgccaaacaggacagctggacttggctgcttctgcccaggcctggatccagcccttgcacatctcagggcaggggataggcctgggtggccagagctgcagctgcacctgctggggaggcctagtccagtcctccagggtccccagacagactcggatttccgactgcagccaccatggaaggatgtggtctgcggtgacgatgtctatccagaggccatggcaggtgcaagggtgggggtaggggcagcagctggggatgctacatttagggacagcccctttttatccccaagacctgggactgtccctgaaaggaaccacagcttctgggtcctgagcagtgggtgagtgtcatacccacagaggggctggaagggagcagcttcagcctagactcccagggcagaccctgccccagccccgaatatccaaggagcccaagatcagaggcaggaataggccaagctccccagtggagaagctgtgctggaccaggggtttcccagggccctcccttgtgccctgaatgatgtctgttagggcacctacaccctgttactgctcagtgccttgcctattttgaaggacagggatgtgtggtgattatttgtataatccagcccccagcacctggtcctcaaaagttacccaagcaatgtgtataaagatccagcctggagatctttgaaaaccgattcgatgagtcgaaccattaagtcatgatcaccatcctcaacttcatctctttcttcctcctcctcctcattatcatcaccttcaagaactgttaagagtctgagacttcatcctatttgcagactaaaaagtaagcctgccacagtgccatggatgctggcagaagatacaagactcctgggtcagagacaacgaataatctgtttttcacagcaatagcagttgccaaggtatcagcattgtcttgcaccagttccacaaggtgatgcaaagagggccaggtgacatctgcatgccagagctcagggatcccaaatatttcatacttgacagtaagcatatatctgtgttttgctccaaagagaggcattctctgtaccttccgaggttgttcactccacaaacactcttgaaaagataatccacaatcagtgcctttgcccgagagacatgcagaaatgcagagatccatagtagaccactgtctcccaacaaccatcaactttatcaatgaaatgaagtctcaggctatttgtctgttaccatagcccacaaaaatgtctggcttgattgtcaccaaatgtatcaaggaagttaaggagtatctgacacaaaatgtgaaccaagcaattctcaaaggagcctcccaggaaattcactttaggaagtcctaggaggctcctctgagagttgctaaaacaaaacattgagagtcctagagggctgcagatctgaacttgagcagatatttttaaagattttgtggcagaaaaagaaactggaaagcaagagggcagaccctcattgcagttctgtaatgtaagggggcagagcaggggcctttctcaccagagtatggggtcctgaagatctcctcaaacatttttatactaggctctcagggcaacagaaaagatgggagcgatgaatggggcgtaaaggagtgcaaatgacacaaggggtcacatgaagcaaaagaggtttattcaaccagatttagtccatgtttaattgagccactcctttgtgccaagctctgggttttcccatgcaccaagcagtgtgttaccacctagacccagagagccatgtcatcatcagcaaagcacgccctagtgtcatgcaaggaccaggcctcagattccgactccagacctactgcctcttggccctgtgacattaaaagagtagggaatcagcctgagcagcatttcctcatcttcaaatgtggaggacagtagatgatcttagctcccaggattagtgcttgtaaagcaataataatgtaatgcattattattgtattatgcatcatattcccatattatagtcaaaaaggaccccaacttaaagcacctgccagccctctcctcctccaccactgccgaatggagccaggcacgagtattccaggtggacagacgaatagaaatacaggggacgagccccttcctagatcctagcgcagcttgctccctacttaaggaatgatattggaccctgcattcatcttctctggatggtaattttctcacctgtaaaacagagacactggccccaaggacaccccacaagtagttgtgaatcccaaagtaagagaagaacaaaaaaagaaccagaatttattcaacacccactgagtgcttagcaaacacatggtttctttaactctcataagcttcatgctgcagaggaactctccccattttacagataaggaaactgaggcccagaggtaacctaggtctagatagactccacatttatgacttcaccactcttccttgcctgaaggatatagaatcactccctgcagggctcttgcctgactcaggaaagggccacaggatagccagccaggcttaaccaacccagccaagaaagggctggtcccaactggctggagtgcagtgtacaggcacccagcctggaagactgatcagaaaagaagccacagctccagccccagccccaaccccctgagctcaagcccttggggactcctgctgggcagctctctaggccctagggagatgctccacagacccaggctgccctttgggaagtggggaagacaagtgggtcaggtgtgcaccacccaggggcggggccaggcagccggctgtggtgggaggcagttgagccctggattgtgaccgcttcagggcagttggtagatgcccctctgggagagatccccaggggtgacagccatggaccctggaagggcctgggctagggacagggaccagagccagtccagggagaggacagagccaatggactggggtgtactgtaacagccctgctggcgagagggaccagggcaccgtcctccagggagcccatgctgcaagtcgggccagaggtgcccctgaacctgaaggccaatgagacccaagacaggccaagtgggttgtgagacccctgaggagctgggccctggtcccaggcagcgctggcccctgctgctgctgggtctggccatggtcgcccatggcctgctgcgcccaatggttgcaccgcaaagcggggacccagaccctggagcctcagttggaagcagccgatccagcctgcggagcctgtggggcaggtaaggggcaagagattccaggggatgtgggggtcctgcagcagagctgggaaagggtgaccaaggggagacaagccagaggagtgaggaggaaggttaacccctaagaggggcctgggctgacactggctttagtaatgggttgatattttgtccatcacagatttgtttgaattactgtttttaatatcatattacgatattatttttcttgatttctgagttttctggcgccacttaaattttcaccagggtcagtgcctcaatcacctagtcctagtcctctgggtagggaaggaacagaggcagggacaggacatccacagggggtggtggccactgtccccacagggtgcccaggcctgttcctccccctcctcctctctgcccatgtgcctcctgcccagtgagggcaggggccactccctggagaaggcagcaagggcttggtttggtctcccccaaggctgtctgttcaccaacttgcacataaatgcttactggggccaggctcaaggacacagggagggtgggatgaaccgaggggagctgtccagtcattggaacaggcccacggcccatgtttggagcaataaagggagaggggatctccctctgggatgatgcccaggctggtctcacagatcgaggggcactggctggtgatgggtgcccccaaaagacagagcagcgtcagaggagaggagagcacaggatgaggctgggagctcctgggtgactgggaaggggaggcaagaagaccatagggtccgtgcaccattcccagtccaggacgagtccttggatggatttaggtagattgattatcagagtcagatttgtgtttttggaaaaatcagcaccggattggaggctgatgcgacgcccgattagaggagggaggagagggggtgatggccaagtccagggtaggtggggatcctggaggaagccgtgccttggggatggggaggacactcagattcagagcacccaggggcccagtttcctatgaaatgggagcatgaagttgaagtgagggctgagcagaggggagcagacacgctcggggactgtctatgggcattaaaaatgtataaccattttagcaacaggcggcgagtcaaaaaacaaagtgtgtttatctaaactgggcaattccacttctaggaatttatcctaagggttggttgggggaataatcaaagctgtaaccaaatctttataacaagggtggttagctcagcattattagtgatgggagaaaactggaaaaaatccaaatatctaccagaaagggtgtgaaaaaacacaattgtatttgggggactgttgttgtttttgttttgaaacagtcttgatctgttgctcaggctggagtacagtggcgtggccacagctcactgcagcctcaacctccagggctcaaaagatcctccagcctcagcctcctgagtagctaggactacagatgcaggccactacacctggctaattttgattaggattattattagtttagagacagagcctcgctatattgctcaggcctgtctcaaattcctaagctcaagcaatctttctgcctcagtttcccacgtgctggaattacaggcgtgagccactgcacctgacccaactgtgtttttaaagtatatatgcattttcaaaaacctgtcagaaaatatagaaaaatgtcaatggtgtgtctggctggctgatgggatttcacctaattttaatgtggctttataattttctggttttgtgaagttgttcacaaaaagagacatttcttctaatataatttttaatacaacagtaatgtactcatgtgcattactctttttgtaatgagtatattacaaaatgtaatgacttttgtacattactcttttttcttgccaaaaaaaaaaaagattaagcagagaagtatataaagtaaaagcaagtgcttctgcttaccatctctcacctcttcccagagatagccactgtcaggttggtcaatatacttccagaacttttcctgtgtgtgtgtgtgtccctgaaaacacacacacacacacacacacacacacacacagttggtgctgggattttattttgcaaaagtaagagccatattctgcatattaccaacttttaatctattattgacactttctgtatcagtccatatggattaaccacattcattgcttataaactttgttttataagcaaagtttagatgagccagaatttatttccactaaaaaatctaaatgacaaatgatgctgcagtggaaatttgtgtgtgtgtgtgtgtgtgtgtgtgtgtgtgtgtgtgtgtgtgtgtatgtgtacaaagtgcacttatatatctccccaggatagatgcctaaaagtggaattgctggatcagagagaatgtacttttgaaatcttataggtagtgtttccaaaagtctgtgtccactcactccggtgaatggtagtgccttcgctcctacattcttaccaataatgcaaaattgttgatctttttatattctgcccatctgatgagcaaaaaattgaatgtgtttatggttttattgtgtattttattactggtgaaattattttttatatttttatttattggttttatttcgtctgtgaattaactggtcatcatgttgcccgcctttccattcagttgctttcatctttttatatatcaataacatattgggatatatttgggattttaaccacttgtttagtgtatgtattgtaaatatttttccctggtctgttttacgggtcttttgtttatggggtctcccaccataaaactgtggtaaatttttatgtgtcgaactggtttaatcttttctttatggtttctgtgacctccaccatgtgtaggaagttgtctttatttcaatattataaactcatttttctgttttattctggtacttttggtgtattggtgttttatttttttttctttacttcccctggagtttatttttgtggatgtaggaataagaccttattttccaaataggaaagccaatcatcacacatttgttgaatataaatgcaacttttctcaattactacattactgatttattacattctttctgtggttctcttggtttattgagctattcctgcgcccaccctgttttgattattttagctttatggtatgttcggtaactggtagggaaagaacccgtcattgttactttttctcaaaatagtcatgtctattatctgtcattcttagagttggactgcagaattggttctctaattttcaaaaatcattcttgtgttatgtggtaatatcacagaatatgggattaatttgagaactgctatctttataatgctcagtgtttttgttcagagacatgatgtactctccattcactcagataagtggtttaatattttattcatgcaaatcttgcacactttgttttttattcataaagggtttgtaaatataattttattgaagttataaattttttcacaattttatatcgtaaatgattactgtttctatagcaaggaaccctattaacttttctatgttgctcttgtatccagacactttaactcttgtattaattccagcagttcttcagctgattctccgtgtgtgtgtgtgtgtttgtgtgtttagttaactatcacaccatttgccaagaacaattttctctctttttctgtaatatttatacctccttctctcccccttttatgtcatttcattggctggaatctatacaatatgctgaataataaaagtgagactagacaaccttgccttgtttctgattctttaaatgttttgcctttaaatatgaaggttgctgtaaatttggggagatattcttcactgagttaagaaaattttcttcagtaacttaataaaaggctaaatgtttgctttctttatatgagaaacaagtgttgaatttatattactattatattaaattctgtttcaaaaatcttctgcacatgtcttaaatacaaatgtattaaatacaagctgctgctaagatgaaagttgctggccccatcacaatgggtatcttccaatgtgaataaattgccttggggaataaaatcagatttggaaaaacctgaggatggttgccatcataaactcttagagtgtgacctgggtgtttttctttttctctgtaggatgttaatagtatcttgtgtcatgctaggatgtctaggacagagggcaatacaatgaggggaaggcattctgcgatgtccccaggcctctggcttgaagagtaacttgctgaagtgaggactctgtggaggagcaagttatacagaaagaagtttagttgtgatctgttgagttggaggtgtctacagggcatccaagcagacataggttgaggaggcagaatatatgtgaatctggagccaagaagagaggtaagggctggaaatagggatctaagacccctggacagttgtgagtgtgcacaatgagggtcagatgcagagaaaattaggagactacagagagcagaacccagggtggggatctgggagtcagcagttgggcatgggcctggtagaaagggaagccaaggaggaggagagggggcagtctcagacaccaaggaggggagagtgactagaaagaaaaccttcttgcagagacataggggatggggaagaactgcagactgaactggggcaaaggactgttggccttaaccagagagatttgagggagagatgaggctgagagccaggggatcctgccatgtcccagcataaaaacagtacctgacacagatgggtgcttgggagctgttgtcggatgaatgagtggacagatgcatggatggacggatggatggaaggatgatagattgatggacaaacagatgaacagatgaatagctggatggacaactggatggatgggtagacagaatgatctcagagatcagaaaaagcttcatgcactaagtgggactgaaccgcgtctccatgggtagaaagcagaggaatctccacttgagtcaggaatgacccagtgctctcaatccagggagaaagccagcctggcttcactggggacacttgtgtgggggactcagaggccctttaaatgaggccagacgaggttggacaggtccaagccaactcagcactcctctgccacactgcacaggaggggatgtgtcactcagggagttgctgggacctatgggtcccagtgttgtcatcagcaccgacagcctcagagaggaaagacacacactggggtaactccaaggctgtgtgtggcacttgccttggacagcagacaggcacagggacacctctagggggctggccacccccctgcctcatgtctaggtcccagccccgcccactgcaaccctgtgcccgtcatgcccagcaggctcctgctccagcccagcccccagagagcagaccccaggtgctggccccgggggttttggtctgagcctcagtcactgtgttatgtcttcggaactgggaccaaggtcaccgtcctaggtaagtggctctcaacctttcccagcctgtctcaccctctgctgtccctggaaaatctgttttctctctctggggcttcctcccctctgtcctcccagccttaagcactgacccttacctttctccatggggcctggaggaggtgcattagtctccgggtaaccggcaggaagggcctccacagtgggagcagccggatgcagcctggtcccggggcctgagctgggattgggcagggtcagggctcctcctctcttccagggcagatgtctgagtgagggacagaggctggttctgatgaggggccctgcagtgtccttagggacattgcccagtgactcctggggtcaaggacagaggctgctggggtgggcctgggagctgctgagtctcatagtctaggggagcagccccaagaacagctgagggtctaggctgaggactggatgccaatccagcctgggagggccacacggcctggtgacacagaggtcaccccaaggggagaccaatggagggcacagagagggctctgggtctaggctgcagctctgtggcctgtgctgggtcatgaggacatggggacacagagggacgggtgagactgggtgaggtgccagaatccaaccctcccaggacagtcaccagaaaggagacagtctcttagggcagagatgtgtctgtccctggagccccgtcacctctggggcccagtgtctctctgttcacggatcggcctcctgccttcctcaaagggcatgttagactcaggaaatgaccagaggggagtgaatgaggggtgcagagaactccatggctaccaggtgaagtttggggtcatcacaggctgctggggtgggcctgggggctgctgagtctcatagtctgtgggagcagccccaggaacagctgaggtgaagggttctgtggtcgggcttgtggagacaggaaacatctcagagcctcagaggagccctgaggcttgtctaggtggagcccactccttgccaggagagccaagtgggctgggctggggcagagcccggtgcctgtgagggataggaagctccagttcaaagcaggcttgggtctccccacacactgcctgccaggacagtcctacaggatgagcaggggacccacagttcacggaggaggctctaggtcctggaagaataaagtgggtgatggaggggggtatagggatggaaatgagggatccaggggtcaaggccagattctaaactcagactccagagatcagagaagaaggaacacagcctgccctgggtatatggagaaattgaggctgtagaggagaggggctgggccaggacacctgtgaaaggtgacttgggagggctcctaggaaggcacagagctgtctgctctccacagggcatgagtggaaaggatggggaaagaagaggagagaaccccgggtggaccggatggccacactgtgaaccctcccagagactttagacagagagaggggctccacaacaccccggtattctgtctgccctctctcacccccttccctgtccacacaggtcagcccaaggccaaccccactgtcactctgttcccgccctcctctgaggagctccaagccaacaaggccacactagtgtgtctgatcagtgacttctacccgggagctgtgacagtggcctggaaggcagatggcagccccgtcaaggcgggagtggagaccaccaaaccctccaaacagagcaacaacaagtacgcggccagcagctacctgagcctgacgcccgagcagtggaagtcccacagaagctacagctgccaggtcacgcatgaagggagcaccgtggagaagacagtggcccctacagaatgttcataggttcccaactctaaccccacccacgggagcctggagctgcaggatcccaggggaggggtctctctccccatcccaagtcatccagcccttctccctgcactcatgaaaccccaataaatatcctcattgacaaccagaaatcttgttttatctcattttttttctcacataaattgctagcctccccggggttctcagtgtggggtacagggaattctgcacccagtgtgaaaatcacccaagggaggaggctcacagcctccctgagtcatctccccagagggtccttcctctcccagtcaccccttctccaactctccactgtacccctgagctaccagtctggcatcagttcagaccagtcccacaccctcctaaattttacttctcaataaatacctgatcatgtaaaacgcagcatttctaatgtgcagtctctgtctggtcatgtgtctgggctgaagggtcactgctcagggacagggggcagttccaggtgagatcccatgtctccgtcatcccacaccccacccaacctgccagggaaccgggtgagctccctgtgccagtgggaactgcaatccaaggcacaaaattgtcctgcagtccttgcccacctgggaagggacaggggcccagtgagaggtttgctggcgccctgtggggagattcaggagaaatgaagggggtccccggagaccagatgagggctagaggcagaaataatggaaaaaggacacccttgactcaaggccacggtctcagcaggaacagaaggtgaaattccccattgcatacgaggaaccagtcaggagagtgtttactgggtgagggataaataactgtgctgccactgggaacttgtaaaaacattgggaaaggaaacatgcaagtgtctttctaagacttgtacaatggacattggctaagtaaacatactgacaagtcctgcactagggaaccagtttaatatgatgagccacagcatatccaaaagcatgttgatctccttcttcacctttagaagacccaaaacactctgaaagataccagcgtttcctggaactagtttgtggaatatggggtgaggttgatgcacatgatgttacgggtatatgatcacatggctgtgggttggggatcaggctcaaagttaacactagcgtggggctggatgtcaagcatgaagggtgtggaccactaagtcaggcccaggtagagttaatttctgattggtttgtggctggagcttgatgatggtcagtctgcaggagcaggaggatgtggggaaattgggaaaatgagaaaagtcacaaatccaagctcaaactctgcatctattgattgcctgggggaggctaatcagagttgaattcaggatgagcttcagggctgggtcagactgaataagagctgagtgaatgtgggctgatggctccaggcaagtcctggcctccactaggagtcagatcccacaaaccctcctgcccgcagagcaccctctccctccgtagctcatggtggcgcagcctccccaccccatcccatgtacacctgctgcctcatctcagagacactcattccagtgtctctgacagcagatgatgtcagcctcctgggtgtggagaccccagctgtcttggagagtcctcagtgcctgggtactctcagaccccctgtctctgcctccagcacatcagagacatagcagctgcctccaccagagctgctgggtgatcccaacaggccagggacagagcctgcaaagacaggaatctctgcagtcacaatgaggcaaagaaagagccccttagagcttgatcacagccacccctgatccaaatcccagcctctcattagaaggaggcttgagggttctgttgccacagcacctgtctgagcccatttcatggaggggaaaactgagatgaccaagggccagatccatagtcctgctgggcacaaggccatccccagcagctgcctaatctttgactgtgttataagtttccattatggaaaactttgaacacatacataaggagacagagaaataataatgcccccaagttcccatcacccagcccccccaataagcaattcacagacattactgacccacccatagcagaataacccctccattacacaataccagacatcacatcttttcagctgtaaatatcccatttctatgctggaaagatatgggcttaaaagtaactgcaatattattaccaaacctaaatagaaattatcactaattccctaatatcaagaaataatcatgggctcctcaaatccctcacaaatgccagaagcgtattgacttagttaagtgttggtgctgtggttattttggggttttgggtggtttatttcagaattcaatatggcatcaaatggtgatgggcgcatgtgctgtcaggccagttgtcactggtgaatatttcctcaattgctctagtgctgcctggcaaggcaggagctgcaggagttgagagctgtccggggaccttcccacggttggaatacagccacacctcccaaaacaagaacccagggctatcatctacttctttttttttccccctgcaaaatggttctagcatggagggacttaactggattcagactagacattgcaaaatagcttccaaggacagggagctgctaacagcgagatcacccatgtcagattctcactcttgtagtaatgttagctgcataggatggtcaatagctacatccctcagaagggaaggaaggcagagggatgaggcttcagttcacctccttctcatgagtgctgcagagcatctgtgaattcagaggtctgcagctgggctctgttcacccaggagtgtgcttcatgctctaggaaggagccactttgcacacagatgatccggggcccagccatccttccagggtgaataattaatgtcttctctcatggtgaactctaggattcaagccatctaatgtttttgaagccactgtcattatatttaattgatgatgacaggtggccaccaatgatgaatattttcccagggggagtctccctaagtggctttagacttcctcacatggccccaggggattaaatggctcctgattactcagaggataagaggttctgtcttatcatgttcctttcttatttgtcttatgtgtctttcctgccccaggcctgggatcccccactgatctcccttcccttagtgagaggtggtatttggagaccacattctggaggctcccttatgtcccccatttgaaaaagacaacggcagccaccaccccagctgtcccacccaacatgaggccagattcggggtgcagggatgctcccaaggttaccctaacagatgtgactggcacttcatattgggaccagccaggcctcactgaccaggcctatccaactagaactactccagaaggtggggctgaaacccaccaaggttcccagaacactgcactctagggcaatcagcctctgcatgggaggagaggggcaccctctgcaccaccccatggtgttaccaaaagttgaaccatgggttggttcaactttgcagagaagagaccacctaacccatctgtggaaattcactccttagcgatactgatgctccctaagaaattcaatcctgggcctgagtgatggttggtgcaaaaaacaaattcaagatcccagtgtcctccagaagcctggatttccagggatcctgctgtgagtcacaggacgtcaccggtccccttctctttgtgggttgagtgtgggggccatgtggactccctcatgagcagatgccaccagggccactggccccagcttcctccttcacagctgcagtgggggctggggctggggcatcccagggagggtttttgtatgagcctgtgtcacagtgtgtggtattcggcggagggaccaagctgaccgtcctaggtgagtctcttctcccctctccttccccgctcttgggacaatttctgctgtttttgtttgtttctgtatcttgtctcaacttgtggtcagcctttctccctgcatcccaggcctgagcaaggacctctgccctccctgttcagacccttgcttgcctcagcaggtcactacaaccacttcacctctgaccacaggggcaggggactagatagaatgacctactgagcctcgtctgtctgtctgtctgtctgtctctctgtttgtctctctgtctctctgtttgtctctctgactgtctgacaggcgcaggctgggtctctaagccttgttctgttctggcctcctcagtctgggttcttgtcggaacagctttgtccttgggttacctgggttccatctcctggggaattgggaacaaggggtctgagggaggcacctcctgggagactttagaaggacccagtgccctcggggctgatgctcgggaatcacagagctgggacccagagccaggatccagacccagaatgaggtaggaggtggaggggctgccctgggcgtctgggggctgccagggactgagccctgagccagcctgagactcaggaaaccccgtcaggagggagaagggagaagcagactctggacaccagaaagccaggggaagggtcacaaaaggagtggatgtgacggaagggcgggctcctgggtctcttcagaacatatcccctgtgcccagggggatcagaggggcagagtccactgcgtgaaagccccactgctatgaccaggtagccgggacgtggggtggatgccagaaaagactccacggaataagagagagcccaggacagcaggcaggctctccgatccccccaggcccttgccccatacacgggctccagaacacacatttggctggaacagcctgagggaccaaaaggccccagtatcccacagagctgaggagccaggccagaaaagtaaccccagagttcgctgtgcaggggagacacagagctctctttatctgtcaggatggcaggaggggacagggtcagggcgctgagggtcagatgtcggtgttgggggccaaggccccgagagatctcaggacaggtggtcaggtgtctaaggtaaaacagctccccgtgcagatcagggcatagtggaaaacaccctgacccctctgcctggcatagaccttcagacacagagcccctgaacaagggcaccccaacacctcatcatatactgaggtcaggggctccccaggtggacaccaggactctgaccccctgcccctcatccaccccgcaggtcagcccaaggctgccccctcggtcactctgttcccgccctcctctgaggagcttcaagccaacaaggccacactggtgtgtctcataagtgacttctacccgggagccgtgacagtggcctggaaggcagatagcagccccgtcaaggcgggagtggagaccaccacaccctccaaacaaagcaacaacaagtacgcggccagcagctatctgagcctgacgcctgagcagtggaagtcccacagaagctacagctgccaggtcacgcatgaagggagcaccgtggagaagacagtggcccctacagaatgttcataggttctcaaccctcaccccccaccacgggagactagagctgcaggatcccaggggaggggtctctcctcccaccccaaggcatcaagcccttctccctgcactcaataaaccctcaataaatattctcattgtcaatcagaaatcttgttttatctcattttttcttttctcacatataattcctagcctttcctgggttctcaatttgtggtggaaagaaccctgaacccagtgggaaagttgcctatgtgaaggggttctcagttccctgggcatctctgcaggtaaggccttcctcacccagacaccccttcctcagctctccactgtacccctgagccaccagcctcgcctggctgggaccaggggggtgtcacactctcctagattctgcctttcaacagaaacctaaccacgcatcacacggcacttctcgcatgccttctgtgtctgctccagtctctgggctaaagagttgctggtccgggacaggggataggtccgctcttggtcagatgccaggtccctgccatggcatccctgaccctatgcaacaagccagtgactctggtgagctctctgtgtcaggagaatccatgatccagagtttcatattgtcctgcaagcatctggtgggctgtagctcttgccaaactgggaaataccatggcccagcatcaggatgcaggacagtccggagagggaaatcaggagaagtgaaggggtctctggggagcccagatgtgggctagaggcagaagtaagggtgaagagcacctatgagtcaatgtcatggtctcagcaggaacacagttgaaaatccccattccacacaagaccgtttagcaggaaaggagtccatacttgtgctgccaccaggatgtcctgagaagccttggagaatgaaacatacaggtgcatttcctagacttgacaatgcacgttagccaagtaaaggcaatgaaaagttctctactagggaaataatttcctgtggtaaagcttagcttatgtaaagtcacatttatccatctggcacctctaaaagccccataatattctgcaagatactagtatgtcatggaagtagtttatgaaacataaagtgagatttaagaacaaagatgttacgggtgtatgataagatggctacaggctcagggtcaggctcgaggagtgaaggaggccgtgtcaaattcatgacaagagttggagctgggccaggctgggtcagggctgtgtgaatgcagacagagggctacaggcaaggtcaggcatccatgaacactcagctcccccagaccctcctgcccactgggaccttcgccctcccttggtcacagtggtggagccttcctacccaaacctctatggaggccctggatgactgtgcgttcttagtgcccacgcaaacttagactccctgtctctgcctccagcacatcaggaatgtggcagctgagttcaccagagctgctgggtggtcccgacaggccagggacagagcccgcaaagacaggaagctctgcagtcacaatgaggcagagaaatggccccttggtgcttgatcacagccacccctgatccaaatcccagcctctgaattagaagaaggctaaaaggttctagtggccacagtccctgtctaagcccatttcacaaatgagaaaactaagaccacccaaggagggccagttacgtaggcctgctgggtacaaggccaaggtctacttcacacccagcagctgtccaaagactgagctgtgtcataagtttatattatgaagaactctgaacatataaataaggagacagaaaaataacagtgtcccatgttctcatcacccagcactcaaaataagcaattcacagatgatgccgacccacccacagcaaaataaattctcccttacacaacatttagaaagaaatacaagacatcagatctgttcagctgtaagtactccattactgtcctggaatgacatggaccttaaaataactataatatcactaccaaacctaaatagaaattatcactaattccctaatatcgagaaataagcagggtctcctcaaatgcatcagaaacaccagaagtgctttggcttagttacatgttggtgctgttggtatttgggggtttaagtttatatgaggagcaatatgacatcaaatggtgatgggtgcatgtgccatcaggctggttgtcactggtgaatatttcctcaattgctctagagcctcccggcaaggcaggagctgcaggagctgagagctgtctggagaacttcccctggctgctatacagccacgcctcctggagcaggaacctagggcttccctcagcttttattttcctggaaaatgattctagcatgaaggggattaacttgattcagattggacattgcaaaatagcttgcaaggacagggagctgctaccagcagagtcacccatgtcagactgccactcttgtagtaatgttagctgcataggatggtcaatagctacatccctcagaagggaaggaaggcagagggttgaggcttcagttcacctccttctcatgagtgctgcagagtgtctgtgatgtcagaggtctgcagctgggctctgttcacccaggagtgtgcttcatgctctaggaaggagccactttgcacacagaagatccggggcccagccatccttccagggtgaacaattcatgtcttctctcatggtgaactctaggattcaagccatctaatgcttttgaagccactgtcattatatttaattgatgatgacaggtggccaccaatgatgaatattttcccagggggagtctccccaagtggcttcagacttcctcacatggccccaggggattaaatggctcctgattactcagaggataagaggttctgtcttatcatgttcctttcttatttgtcttatgtgtctttcctgccccaggcctgggatcccccactgatctcccttcccttagtgagaggtgatatttggagaccacattctggaggctccctcatgtcccccatttgaaaaagacaacggcagcctccaccctagctgtcccacccaacatgaggccagattcaggggtgcagggatgctcccaaggttaccctaacagatgtgactggcacttcatattgggaccagccaggcctcactgaccaggcctatccaactagaactactccagaaggtggggctgaaacccaccaaggttcccagaacactgcactctagggcaatcagcctctgcatgggaggagaggagcaccctctgcaccaccccatggtgttaccaaaagttgaaccatgggttggttcaactttgcagagaagagaccacctatcccatctgtggaaattcactccttagcgacactaatgccctctaataaattcaatcctgggcctgagtgatggttggtgcaaaaaacaaattcaagatcccagtgtcctccagaagcctggatttccagggatcctgctgtgggtcacaggatgtcaccggtcccctctctctgtgggttaagtgtgggggccatgtggactccctcatgagcagatgccaccaggaccactggccccagcttcctccttcacagctgcagtgggggctggggctaggggcatcccagggagggtttttgtatgagcctgtgtcacagtgttgggtgttcggcggagggaccaagctgaccgtcctaggtgagtctcttctcccctctccttccccgctcttgggacaatttctgctgtttttgtttgtttctgtatcttgtctcaacttgtggtcagcctttctccctgcatcccaggcctgagcaaggacctctgccctccctgttcagacccttgcttgcctcagcaggtcactacaaccacttcacctctgaccgcaggggcaggggactagatagaatgacctactgagcctcgtctgtctgtctgtctgtctgtctctctctctctgtttgtctctctgtctgtctgacaggcgcaggctgggtctctaagccttgttctgttctggcctcctcagtctgggttcttgtcggaacagctttgcccttgggttacctgggttccatctcctggggaattgggaacaaggggtctgagggaggcacctcctgggagactttagaaggacccagtgccctcggggctgatgctcgggaatcacagagctgggacccagagccaggatccagacccagaatgaggtaggaggtggaggggctgccctgggcgtctgggggctgccagggactgagccctgagccagcctgagactcaggaaaccccgtcaggagggagaagggagaagcagactctggacaccagaaagccaggggaagggtcacaaaaggagtggatgtgacggaagggcgggctcctgggtctcttcagaacatatcccctgtgcccagggggatcagaggggcagagtccactgcgtgaaagccccactgctatgaccaggtagccgggacgtggggtggatgccagaaaagactccacggaataagagagagcccaggacagcaggcaggctctccgatccccccaggcccttgccccatacacgggctccagaacacacatttggctggaacagcctgagggaccaaaaggccccagcatcccacagagctgaggagccaggccagaaaagtaaccccagagttcgctgtgcaggggagacacagagctctctttatctgtcaggatggcaggaggggacagggtcagggcgctgagggtcagatgtcggtgttgggggccaaggccccgagagatctcaggacaggtggtcaggtgtctaaggtaaaacagctccccgtgcagatcaggacatagtggaaaacaccctgacccctctgcctggcatagaccttcagacacagagcccctgaacaagggcaccccaacacctcatcatatactgaggtcaggggctccccaggtggacaccaggactctgaccccctgcccctcatccaccccgcaggtcagcccaaggctgccccctcggtcactctgttcccgccctcctctgaggagcttcaagccaacaaggccacactggtgtgtctcataagtgacttctacccgggagccgtgacagtggcctggaaggcagatagcagccccgtcaaggcgggagtggagaccaccacaccctccaaacaaagcaacaacaagtacgcggccagcagctacctgagcctgacgcctgagcagtggaagtcccacagaagctacagctgccaggtcacgcatgaagggagcaccgtggagaagacagtggcccctacagaatgttcataggttctcaaccctcaccccccaccacgggagactagagctgcaggatcccaggggaggggtctctcctcccaccccaaggcatcaagcccttctccctgcactcaataaaccctcaataaatattctcattgtcaatcagaaatcttgttttatctcattttttcttttctcacatataattcctagccttccctgggttctcaatttatggtggagggaattctgcacccagtgggaaagtcacccaagggaggaggcttacagcctccccgagtcatctctctggaaggtccttcctcttccagtcaccccttccccaactctccaccatacccctgagcctccagcctggcctcagctcagaccagtcccacaccctcctcaattttacttctcaataaagacctgatcatgtaaaacccagtttccaatgtgtcgtctgtgtctggtcatgtgcctgtgctgaagggtcactgctctgggacaggaggcagtttcaggtgagatcccatgtccccgtcaccccacaccccacccaacctgccaggaaaccgggtgagctccctgtgccagggggaaccatgttccagagcagaaagttgtccctgcagagtggtccctgaaatgcagttcttgcccacctgggaaggatgtggagcctagtgaggacagagtggtggccctgagcagggcatcggggagaaacgaggagtgttccaggaccccctgctttgggctagagacagaaaacccttgagcccaggccaagatcagagcagaaacagggttgaacttccctgtcccatccatgatacccagttaggagaccatttactaggtgccatcaccttacgttacattacaacattacgtgattgtgccatcacccgggagacatgaaaaaggctggaaaatggaacccttcagtgtagtttacactttcacaatgtacgttagctatgaaagatgctgacaagtcctgcagttggaaaacagttcatgttacataaccttgcaagtcaagaattctattcagtgtcccaacccacttagccctagagcgctcttcaagacactggtgttcatgtcactagtgctgggacatgggctgaggctgaggcacacagatgattcgttgtgatcaaatgggtcaggctcagggttaacactggccaggtcagaaagagagcatagggctgagatctcaaccatgaagagtctcgaattctaaagtcaggggacgcagtagagttagattatggttatggctggagccatgatggccagcctgtgtgagggtaggactcaggtggactgggtcaaatgagaaaggcaccatcccaagcatagaatcggcatccattggttgtctgatggaggctgtgtcaaaatcatactcgcccaagaatcagggccaggtcacactaggtcagggcagggtaagtgtgacttaagggctacaggcaggtcaagttttcatgggactcagctaccttagacccctccccaccagggcctactccctccctcaatcatgtggttcagcccctccatgtgcacctacaccctgatgtcagagacacaatcatcccagggtccctgacagcgagtgaggtggccttgggagatgcacttcccagccctcctcatcagtcttgggcactgtcaggccccttcttggtgcctccagcacatcagcggtgtggcaggtgccttcaccagagctgctgggtggccaggccaggcctgagacagagcctgcaagggcagagaactctagggccatagtggggcagagaaggggttcctcttggagcctaatcatagaacccctgcctcaagtcacaacctacaagttagaaggaaacttaagggtcctgattcccaccaccctgtctggccccatttcatagatgtgaacgctgagacccctatagcaaagaggaccgctttgatctccaccttctcaatggccctgctgggtaggatcccctctggatgtcccctggtgctgtcccaagactaatctctctaattactgccttgtaagatattacggaaactgacagcaagaaaataaaaaaacaggaggataatacagctcatgttgacccacccacaatcaagtaacctcttttacacagttgtttgaagcaaattgtagacatcatgtccattagtctaaatattccatttgtgtctctaaaaatatggacccccccaaaaaaactacattcttacaaacctaaatataaatatctaattctttcatatcaaaaaaagaatgtttcccatcaaatacttcacaaatatcctatgcttctttcactagacctgtgtttgtgttgttattctgtggttttccatttcatttctatgaggattcaatatggtttgaaattgtgactggtgactgtgtttttagacctgttctgtctgcaggtatcttcctcattgatttttaatttccttgcaaggcaggagctacaggagctgggggttggtcccaggaccttcccatggtcaggatacagcctgtggcctccccaagctggaaacaagcgctcctctctgcttctgcgtttcctgaaaattggttcttggccagaaaggtttaacaaggctcagtgtgacttttcagcaagaccgcttggctactgggctcccatgtggggtcatctatttgtgacgttagctgggcttcacactttgtatccagtgccattagatggtatatggatgcaaggtgactgcatttcagttcgaccaccttttccttctactgactgtctgtaaaaggtgtgccctcatatgttctttgctcctctgggagtgtgattcttatttcagtaagaaatagcatagacatgttgagtctttcctttcatttagcatcttaataatgatgaccatgttgcctgccatctcgtgaagatgaacaattatttcatggtgagctcaaagttatgttactgtatgtgactcacttgagtccaccatggttctattttattgatgatgacaacgacccaccgtggcccactcagtgcctcttctggtggccccaggatcctcctgaaggaacccaggagacctcgatggctttccactctctgttcacaatctatcctgggcacatctttctcctgccttgtgcctggaattgcccattaaccccaagtggactagtccccataactgggaggtgggatttagtgaccacacttggggtgcttctcacacagcccttttgagtcagacactccagacatacccagaaatgagacaagaccctgaaagggtaacaggggcttgcttccaacttctccctggaggttgaggctggcatttcatactaaaacctagtgagacccatcccaaactaagacaacacaaggaggacggaagtgagacgccctggagttgtggttgtggtcacgttggagcttcccatgactgctgactctggggcaagctgcccctcctctaaggcactcactggggacacctgaggacgcctcctgctcttaccctgtagtcacaccaagagatcagggttacaacaaccctatagagaatccctgtccccttccatgtcacttcactccttcgtgaagcaaatgccctcaaggagctcattcccattcctgggtcacagtcacctggaaaacctgatccagacaccaacctcctcaggcctcgccatttccagacgtcccgttactgcatacgcttggtcgactgtcccatctcagcttgagaagggcaggcaggtgtgtggactctgctgagcaaatgccttccaggggcagtggtctggcttcctgcaccatagcttcaggtgggggatggggagggggagttaggggccccagggaagagtttttgtatgaacctgtgtcaccgcattttgtatttggtggaggaacccagctgatcattttagatgagtctcttcttccctttctttccctgccaagttggtgacaattttattctgatttcgatctttgtctgtgacttgccacagcctgtggtcagggtttcctttgggacctcggtcctgggaggctgatctctctcctccctattcagacccctgtatgcctcagctggtcactgagacaccttcatctcctctgaccccagaggcagggagctccaagacaaggccacactggtgtgtctcatgagtgacttctacccgagagccatgacagtggcctggaagatagatggcatcaccatcacccagggtgtggagaccaccacaccctccaaacagagcaacaagtatgcggccagcagctacctaagactggcacccgacagtggaagtcccacaacctctacagctgccaggtcacgcatgaaaggaacactgtggagaagacagtggcccctgcagaatgttcttaggtccccgaccctcacctacacacgggggcctagagctgcaggatcagggcatgtgtctcccctcccactccaagtcatccagcccttctccctgcacccagtaaccctcaataaatatcctcattgtcaaccagaaatcctgctgtctgtcttcatttcttatctcatatttagtttgcaacctccttaaattctaagcaaggatgaggaaaatccaggtgcccagtttatcgggtgagaagtccatggtggtgccatcaccaggaacttgtggaaaggtctgggaatggaaactcacaggtgaatttcacagattttcacaatacagggtggctaagtaaagacacttacaagtcctgcaatagggaaacaggaagtccagaatcctgctcaccatcccagccaacttagtgagccctaggatgctctgcaagatactggtgttcacgtcgctagctctggaaagtggggtgaggctggggcacacgggtgatcagttatgatcagatgggcttagggtgaggttcaaagttaaccagcacgtggctgagatctcaaccatgaagttcccaattctaaagtcaggctctggggtggagtgagtatgtgcttggtgtgtggctgagcctgtgatggtcagctcgtgtgaggggaggactcctgtggactgagacaaatgagcaaagacaccatcccaggcacagaacgggcatcccatggttgtcggggagagtctgtgtcagagtctcattctggactagagtcaaggctgggtcacgcaaggtcagcacagggtgaacatgacctaggggctatctataggcaaagtcaggctttcacgggatctcaactgccccaaacacccccatcccaccaggccccactccctctgtcactcacgttgttccgtcccctcaccccctgcaccatggtgcaccggcagcctcactcagagacaccctcatcccggggtccctgacagtgggcaatttggtcccttgaaggccttgacaggctcggttaatccatagtgcccgggctgggacccccactgtttctggttcatcagggacatggcagcagctgctgggtggccagccaggacaggaacagagctgcaaggcctgggggctttttccacaatgatacacaaagagaggggcccctttggagctcagtcccagccacccctgccccaaatcacagccgtgagctgaattgaatttcaggtgcccagagtccctcagcctctgtttgacccatttcacagctatgaaaattcaagcccatgggagacactgtcccaagcttcaccctctctataagttgtacatttttatgatgaagatctctgaacacaaaaatagggagacagaagaatagtaatgactccaaggttcccatcagccagtccgcagcatcatccattttcagataatgcggacccacccacagcagaataactaaactactccttcaagcaagggtgtgaagcaaatgctagtcatcacacacacaactggagagaatatcaaggatttcttgacatcaaaaatagttaatgagagtcttatcaaatgtcttgtgaatatcattgtgtctatttttgtcgactttgtggtgctgttgcatatttgtgatttaatttcatttctatgtggattaaatacttgacgttatcattggtgaatgtgtttttagacccattccatctgcaggtgtctcccaaattgctctagctttccctggcaaggcaggagctgcaggagcagagagctggtcccgggacctcccacagtcgggatgcaggcgccacctccctgagcaggaacccagtgcttccctcaacctctcttttcctgaaaaatggttctagcatcaagaggctcaagggggttcaggctggacattggcaaactcgcttcccaggacacgtggctacttccagcaaagccacccatgttgtgttgtcattctttcagtgacattagctgcatttgatgatcaataacttcgcgcctcagatgagaaggaaggcagatggtcaagacttcggtccacctccttctcatgagggcttccagaagggagggcacagcagctgcaccgtgcgctcaggagtgtgcttcatgctttgggaagaagaaaaaatgtacattcttcccttttgttcaccactttgataactgatgatctggtgcccagccatcctccagggcgcacagcacaatgtagtaccggagtgagctctagcgtgtgaggacatctgacatgtgggctccactgcagatatactgaattgcaatgacaatgcggctacaaaacataaacatttacccactgggcgcctcctcaggtggcatctgattttctcccattgccccaggagcttccatggctcctgatttctcggaggatgagaggttctgtctcatcatgtccctttcctgccccaggcctgggatcccgcactgacctcacctcccttagcagaaggtgatatttggagaccacactcgggagctcctttatgtccctcacatttgaataaggcagtggcagccactaccccacctcacccaccaaaatgagaccaggttgaggggtgcaggagatccttccattttaccctggaggatagggctggcatttccagtggggaccagccaggcctcactggccaggcccatcccaactaggacaagcccagggaaggctgggctgaggctcctggagtcacagataggttcatgggaagcttcccaagacaccgcactctagggtaaccagcttcttcctggagggagagggcactctctgcatcaccccagggcgtcaccaagcagtcagtgtcgagtcagctccaccagggagaccatttatccctgaccatgggagttcactcctagtgacacagtgccctccaataaactcatccccatggctgcatgatggttggtgggaaaaccaaatccactgtcctccaggaaccaggatttctagggatcctgctggtcacaggatgtcacctgtccccttctctctgtgggggtgagtgtggcagccgtgtgaactccctcatgagcagatgccaccaggggctgtggcctcagcttcctccatcacagctgcagcgggggttgggggtagaggcgtccagagagggtttttgtatgagcctgtgtcacagcactgggtgtttggtgaggggacggagctgaccgtcctagatgagtcttttccccctccttccctggtctccccaaggtactgggaaattttctgctgcttttgttcttttctgtatcttgtgttgacctgtggtgatgctttctctctggagcctaggccctggtcaaggacctctcccctccctgtttagacccttacctcagtgggtcaccaagaccccttcacctctgacctcagatgtagggcactagactggatgacctactgagactcatctgtctgtctgtctgccagagccaggctgcttccctaaaacttgctcagttctgtcctcccccacctgggcttctgtctaacgaactttgtgcaagggaaactgaggccccatctcatgagggagagggaacaaggggctcgaaggagtgaccacctggtggactttagaaggacctgaaaccctcagagccaagataggggaatgaaaactcagagtctcagggcccagtcccctggactgtgggactctggatccaggctgggaacaaggtaggaggtgcaggggcctctccaggtttctgtgggctcccagggagagagccctgagctggtctgggacccatgaagccctgtcaggagggacgggaaggctctggacatgaaggagccaggtgaagtgtcacgaaaggccatggcattcagggaggtggctgatgggtctctgtgggaggcacccctagaagcaggaacccctgagttcaccgacaggcatatcccaaggcagaaaaactgtagattggccctaaacacagagagactctaacacagactccacagacaaagagcccaggacagacagacagtgggacttgggtgagcaaaggccctgactccactgcagaagatccaggagagacggatgtgggtacaaacagagttcttacgtgagagacccactctcccccaacccagagcagctgtgtcaggtgagaaaagtttccagagtgaatctaacaagaggctcacagagctcagagaacacagccagagccggatcacgtcaggatgacagggtgaggcagcgccaggcaattgaaggtccactgtctatacaaaagcccaagtccttggaagatttccaaacaggcgatgggcaggggccaagctcagaggttttctgactgacagagttcttttaggaacatgatgtcacacccttctgagacagtgtggaccacatctgagaggtcctgcactggtactggggggcctgaacactcctcatgcactgaggtcaggggctccccaggtggacaccaggactctgacctcctgcccctcatccattctgcaggtccgctcaaggccacccccttggtcactctgttcccgccctcctctgaggagctccaagccaacaaggccatgctggtgtgtctcataaatgacttctacccaggagccatagaaggaaaatggcaccctagtcaccaagggcatagagacaaccacaccctccacacagagcaacaacaactatgcggccagcagctacctgagcctgacgcccgagcagtggaagtcccacagaagctacagctgccaggtcacgcacaaagaaagtaccatggagaagacaatggcccatgcagaatgttcttaggcccccgaccctcaccccacccacaggggcctggagctgcaggatcccagggcagaggtgttccctcccaccccaagtcatccagtccttctgccgacacccaataaaccctcaataaatgtcctccttgtcaatcagaaaacatgctgtctgctcatttttgtttatccactttccatcctaaatttttttatctccaaagatcaacagaatcctttggacttgtgacaatgcagcctgggaccatcttcgtgtttctctgagccgtactttttccatcaccttatccccatagaatgttccagaacaaggaaatagtcttcagaaggaaccagacatcttcattcttacccacgtctctgttgtgcttcctgctgccctgtgagcacgtccacctctggctgcccggggacacaccctccttacatccctatggccccgggagaacatctcagctcccttctttgttgtcctcggccctcactgtccagatgccatccctctctcaaggtgtttgtccatccccctccaaggccatgtggtcaccccacctgtatttcccctcatcaaagcctagagcatctccccttctccatgggcacactctgttcccgtcatcccagggaccctgccctcagcccccacaggccctccctataataatcactgatgggatgcttaccccctggaccctggtcactcaccccacatccccctctgggtgcctctcatcccacatgtgtcaccggatgccccagctgtattcaacattcctaggggacaagggtcggctctgctcctcactgacaccattatgaatgcctaatgtcctgctgtgcacaagttgtcaattgactggtgagttcaaagtcagattctggggttatgccaggagcttgggtgacgctgattcttcttctgaagaactcagcatgggatctgagctataatacacacacacgtgtacacacacacaatgcacataaacacacatgtccatgctgggcatccttctgggaggatcaggaaggtagaaggggctgcagtcaggcccaggtcaggacatgagcaaagcaaagctgagacctgctgtctccaggctttgggactagggggtcgcccctggatatgggagggtggggcagggttttctgtccaggccaagagggagacaggagaagatgtggacgggattctgatcagggagcagcaggccacatctcagcagtcaggggaggcgcttgctgtggggaatactgttggggactgcatggtgccaggagtgtgtcccaggtgtgagctcttcaggtgatgggcccagaccaggatgcaggtccaggctgtgtgtgtccaggccccacactgcacatgcccatccactgtgggtgccccccgtgccggtgacactccagagcacaggctgtgtgggtcacccgtgcatgtaggggactgcagagcacacacatgtgggtgtgtgtgtaagccgggggagctgaagtggacagcagagatcccccacacgtagagctcctggaggaaaccacactgccagtgaggcctatgacctcccttgagaagctctcctctgggccattgcagctctaatccagcacacatggcctataggtaggaagctgtccccatgggttcaggaggcggacttgggcagtgatctgtgagctgctccttcaggacagctgggccaaggatgctggagctcagaccttgcagtggggtctgtgtccctgtggtcaacgtcattcttcccacaacccccaattcccattccaagcccatcccatcataacctccagtgctgaggatgtggggggcatcaaggaccctccccaccattcccaacttctcaaagaggtcccagctgcaccatgtcagtggcgtcacccagccgctcacctccccttcctccctggcattcctgacaccagctgatccaggccacccaactcctcagaaatgcaattacctgggagacaattccacacacagacctgtcaacccttcccatgactgaggtggatgaacccctaagcccccaaggaagtgatattcaggtcagtagaaggtgacccccttcaccccacctatggctcacccacccatgagaaaagggggctggaccctgggccttgtgagcagctgcagggggttggggggcggggtggcctgggtcgggtgtatcaggagggtttgtgtgcagggttatatcacagtgtaatgtgttcggcagtggcaccaaggtgaccgtcctcggtgagtccccttttctattcttttgggtctagggtgagatctggggagacttttctgtcctttctgttctctctagggtagaggtctcaatctctctggggtctgccaccattgccttttttcctggccccaatttcctccagcctgtcccttcttaggcacctggtggggcatgatgggaagatcccagtgacctcttaatgctccctgctcaggcctgaacctgccgctgtcactcagggggcattctcccctgggctctgggatgttctgctccctcgcacagagtctccagtccccaaagaccagcagagcaggggctcaggctggggcaccagggccatgggacaggggaaggatgctggaaaaagttcagcttcccagggttctgggtcccaactatggggctgctttaaacaccaagaagggaggcctttgactggggacttggggaaatgaagggggacaaggatggaggaagaatgtcctgtgaggtggcgccagggtgctgggtccctcctcctcccccgggacaggcaggctgccatagacagggtggttctcaggacactcagtccaaggttagagcctccccatcccacccaaaaagagagacccccaaagcagatgctgagggaggcactcctggtgggcgcaggtgacagggacctgtcaggacagacatttgtcctaggacagccagatctcccaacgacagggagaccccatagagcagacacagcgccaggctcagaacagaaaatatacctcacatgcaagccctccatctcctggactcccaggacccggctcccaggactgacatcccctccccaccaaggggcctctgtgggaaagtggggcagagactgcaatgatggtgctgggggatatgtgaggaagaaattcacttgtcaaaagggaggagaacctaaaaacaggacacagatgccctcgtgaacagacccagaggagggacctggcaggggatgttcagacagagacgtcccccaaggaaagacgagggcccagggctgaacccagccagcgtcggggagcataggtgaggtgagagctggctgataaggaggggagaatctggagaggaggctggagcagaagaggcctgattctcctcagtcctcagatgctgaggagtttcccatcaggaggtaagcgtccccgccaccgccaagttgacctcagtacagcaagggcccagcctgaggtccctatcctgggccttagtccttcacccacctgaaaactgaggccaggggctccccaggtggacaccaggactctgaccccctgcccctcatccaccccgcaggtcagcccaaggctgccccctcggtcactctgttcccgccctcctctgaggagcttcaagccaacaaggccacactggtgtgcctgatcagtgacttctacccgggagctgtgaaagtggcctggaaggcagatggcagccccgtcaacgcgggagtggagaccaccacaccctccaaacagagcaacaacaagtacgcggccagcagctagctacctgagcctgacgcctgagcagtggaagtcccacagaagctacagttgccaggtcacgcatgaagggagcaccgtggagaagacagtggcccctgcagaatgctcttaggcccccgaccctcaccccacccacaggggcctggagctgcaggttcccaggggagggggtctctctccccatcccaagtcatccagcccttcttcctacactcaataaaccctcaataaatatcctcagtccaccagaaaccctgggttttgtgttttgcttctgtttatacattttctaccctaaattggtccaacctgcaagatgaacaaaattcttttagccttgtgggaatgaagtctggattgtttttgaggggtagttccaccatcacctagaaaggcccagagaatattccagaacagagccttgggcagcaggccccaggactgcccctttcccatacgtgctgtgtttgtgtggacatgtccacctccagcggcctggggcgaccgctccttggttccccatggcccagaagaacgagtaccctccacggatcatcaggcctcacccctggacagcctccctctctcaaggggtccctccttctgaggcggaaggagcctctccagtccatgggcccttggtctcccctactccttaggggcccaccctgttcctgactcccaggaccctgccctctacccccacatctatctctgaagcaggcacagactggaccctgaccctctggacccaggtcactcaccccacaggccagctgggtacccctggtcccacatgtgtcaccagtgtcccagttatactcaagtcccctgggggataagggtcaactctactctctctcacccctaagtaaccagcccaaaactgaccacacctcaagtacctaatgtccagttatccacggatggtcagtggggctggggaggtcaaagtcaatcatgagattccagagtggtgccatagacgtgcctgtaaaccaattggtctttttaagagctgtatgtgggatctaagaaccgggttgatgattgtcccaggaggtagcacaggatggggggcctgggctatgagacaaacacacatacatacatgttcacaaacataaacacacatgaacacctcataggcacacaggtattcacaaacaaacatgcctgcatgcaaatacatacacacacactctcctgtgctatttagaatcattaccacatgggcatcccactaggggctgtgctgggcatccaggaccctcccagggaactcggatctccataggggaccagctccaccttccctgtggcataaacaggcttctcacttcttccatggtgacagtctccaaaggagctgagccgggacacatggcttcctccaggacagagagtagcaggggacccagatgtgatgtgcagacatgcctcctccctctcccctctccctctgggggtgaagggatccctgacttccagtaaagtgtgcatccatgcatggaggggccatccccctcaccctcctatcggccagacctgcttcatgacagggccactggacctgggcgcccaagctgctgcagcggggaacgggtcgggtgtgtcaggaggggtttgtgtgtggggctgtgtcactgtgtgctgtgttcggaggaggcacccagctgaccgccctcggtaagtctccccgcttctctcctctttgagatcccaagttaaacacggggagtttttccctttcctgtctgtcgaaggctaaggtctaagcctgtctggatgtctggaatctttgcccctccttgcctgggctcctgccctcttctgtgattctgtcctctgtgggtcccagttacggggctgcattaaacacagtgacaggaggcctttgactgaggacttggagagatgggggaggaaatggcaggaggacaaagatagaggaagaatattccgtgagaaggtggccccacagcgctgggtcacacgccatcccccaagacaggcaggacaccacagacagggtggtgggtctcagaaaactcaggccctaaacgtggatgcttaccaattcctccactggaggaagacctcagagcagatgcccaggacagggacttctggtagggacggtgactgggacgggtgcctgtttgtcagggaaaacccactggagagtcagatcccccagataacttctcacgacatggagactctttcgaacagacaaagctccacgttcagctcagggagtaaaaaaaaaatgcctcaaatggaggcctttgatctactggaatccagcccccaggactgacaccctgtctcaccaggcagcccagaggggtctctgcagggaggtggggtgggggctgcaatgatggcaccagggagatgtgtgggtaagaaacccactccctgtgagagagaagagcctgaacccaggaccaacagctgccctgcatgaagagatgagaacaaggggaactggtaggaggtgttcagacagacacccccaagatagacaaatacccagggtgagatgtggtcctggactccatcccatccagtgtggagccagcaccggtgggggtctataggtgatggaaaatatgaaaaagagacagatccaagagggggtctgtgacccccaagagtgggggcaactcccatctgacagcgagtgtctccactcaccgctgacctgacctcagtccagcaagggtccggcctgaggtccctgccctgggccttagtcccatacccacttcaagactgaggtcaggggctccccaggtggacaccaggactctgaccccctgcccctcatccaccccgcaggtcagcccaaggctgccccctcggtcactctgttcccaccctcctctgaggagcttcaagccaacaaggccacactggtgtgtctcgtaagtgacttctacccgggagccgtgacagtggcctggaaggcagatggcagccccgtcaaggtgggagtggagaccaccaaaccctccaaacaaagcaacaacaagtatgcggccagcagctacctgagcctgacgcccgagcagtggaagtcccacagaagctacagctgccgggtcacgcatgaagggagcaccgtggagaagacagtggcccctgcagaatgctcttaggcccccgaccctcaccccacccacaggggcctggagctgcaggttcccaggggaggggtctctgcccccatcccaagtcatccagcccttctcaataaatatcctcatcgtcaacgagaaatcctgctccctctcttcttttcttatctcacacataatttgaggcctcccctgggttctcagtgttgggtgggggaatcctggcacccagtgagaaagtggccctgagggagaggctcatagcctcccggggtgtctcctggtgaaagaggcccggataggagaagtctgatcactgaacaccagtccctctgccctttcattcctcccccttctcctcaaagcatagccccccacctccctgcctcctgcctggatggagttgtctctggctgggactccagttacaccctctatctctgccctaacagagacacccttcacccaccatctcttttcccagcctgaaaaccctgctccaagcctggagcctctttgcccctggcccttgcccccggaatgccctcctccctctgtgcccagctcagctcccacccaccctcaccccctccctgtcatccctgagagccagactgtccaggacactccagcaccactgacttctcaagctgttcaatgagggacccacctcgattcctcacctgacagcaggttcagacacttaagaggaatgggaggaagccaggaaggagactcacacgaaaggcctacaggaggctcgggacacttggaaaagataggctctgagctccctaggaaccagtgcaaggagggtaataagcacttcaccacttctgtaaatttaaacaaaccctttgctgaagggaaggtggtgttctcaatgctggggccagtcatctcgtcacaactaaaagtgggaacatgttctatccaaggcctcagtagtaatgggatgtgaaccttgacacacgcacaggtaactatctggcagcccttagacatggtgattctctcaagtgcgtgaacagaaagtcactggccgtctttgggaacatcatttttgggaacacttctccattggatcccgggccttcactggaaaaccaggtccctcatcaggactttctctgtgaggttccctgagtctggggctccaactgctctctgagaggaaggggtgggggaagagaacacgacccagccccacccagcccctcctgcatggcccctcctctgtagagtgggggcacctgcaggggtcaggcctgggttactgtgggtggggcctgggaggggcccttgtggcatcctggggagtctctcccacggctccttgtttgactttcctgtggctgctggctgttatcacaaatgacccctaatttagtgccttaaaacatcacacactgattctctcccaggtctggaggtcagaagtccaaaatgagtccttgggggctaaaatcagggtcccagcagggccggctccttctggggactctggggagaattcgtttccaggacttttccagcttctagaggacaacctcagctcctggccccttcctccaacttcagagcctgagctcagcatcttcaaatctctctcttgctcttctctccctccctaccttcttctctccctctcttccttctctctctctccgtctccctccatccccacatcttgtcctctcactctgaccctcctgcctccctctttcttctataaagaccccagcttggacccacctggataacccaggagcatttcccacctcaggctcctaattgacatgacatctgcaaagtccctgtggccacacatgacacatagacaggtccaggattgggacacgactgtccccgcggggcctaatttagccgaccacagcccctttcccgagttcctctccctttctccatgccctgcccagtccaggctgagccactcctggggggccgtcccagcccagcccaagccctccctatccctggtctcttgtggccccttctcctcctggggttccaggaaggcactgggagtttagccacagctctagggcactgtcttccagcaggccccctgagactaaatgccctccaggccaaatcacccttggaggaagatcctattgtgatcctcactctaggatggtgacatcacagcccagagagcctgagtgacctgccacaggtcacagtagggactcaaacctggtccacccaactgcagatctcagctctggaccccaggtgcctggctgccctcagcccacctggccacgcccacccacttcatccagcttcctccctggagagctcaaagcccactggacccaggcccccatcccgggacccgggattcaagtgacagaattattggaccaacaagggatggaaggggacggggcctcaggttggagtagccagattcctcatgccccttctccttcctccgggtcaaatatcagggtcagggcactcggagggagggaccatgagagtccccttttcctagagaccccatctcagtcctggttctggatccagggcttacggtgtcccccacctccaggagagtcagtccctggcaggtggctccccaagcccaatcccctccattcctggtcccagttgctccctcaacatccaaaaattcctgacatcttcagtcagggactgctctcccaagggaagagcacatggggctctgggtctggggctgtgggaaagaggaaccccggtcctctcggggcccagcaccgagcgcagtaggtgttcgaggggggctgagtggtgacatgtgagactctttgtagaaccccagattcaggttcgtgtacctgatatgcagcggaggtcaaaaactgacacaagtgcttggagatagaaaaagatttatttcatttggctaaagtaagaagacaagaaagcaaattcctccactccatgttaacaaaaggatgaagcagggagtttttatgtggctaaggagtgagggaggtggcatttcaggggaaaagtctgtgtttattcagtctcaggtaacatcttaagcaactagacttgcgggcgacagcggctggtctctacgtccctaaaggcattcactcctgcaaaatacttttgtgactctgaagttatctcctccttcttgacaaagaaacaggacatctgcagcttatgatcacattgtgtgaacaagggatgctgggcaaaaagcaagcagttaacttgtacaagcaggcaagggccaaatcagaattttctttacttcagtcacaaaaatgctgggtactgaaatctcaactcacctggtgtcactcccagggcacaggctaggacaacacgcacccgtccctggagaactctgggctggttcccccttctccccctgctgaccccctcttagtctacctccgctcctcccttcccccaccggagaacctcccagggtttccatttcctcccggataacataacacgtgctgccctgtgaggaggtgctaaagtcaagagcaaggtggcagggggctttcgagcaagaggcgacctgacttcagagaccctcagtccccaagacagacgcatgccctttgagagagcggccgccccaggcacacgcaggctctgggctgtcaggatgggagcacgtggtcctcttccacccacctcccgaatctcccctgctccccgcacccatttccctgtggcccccatttccctgtggtcactgtaatcggaccccactccagtccccttccccactgactctgggagctggggttgatgctggggctggagcagtgaccagcccatggtgaccccggccccatccaggtactaggccactggccaccaatcaactatggtttcccaagcacccatatgtgcccagcctgggcttgggacccaggcctagtcctgcctggcccactgcagcagtaatggtgggctcttcctggagagaacctggaccacagtctctctgcctcaacatctcagtatgaagggccagagaccctcctgatggtcaccttaggagcacaaatgtggtcctgccaggaagaagtaataaaatgtgaatgctgccttcctctggctgcccctccctctctcctgccttttacaagtggtaatcaagggctcctggcctccacggtcccctcccttcctgcctcaagcccagcagtctcaccaccaccccatcacagccccagtggcctgcacgtggctcaatccaatggtcccctcactgtcctccttctgttgacctcaggatgggcttggcaactcacatcattctcgtcatcttgaagcccctcacccacccacccccacccccccgcccccccgccaaggtcctctcttctatggtcccctcccactttgttctgctgctgccccatcagggccaccggcagctagcacccttggtgactctttctttcactgtgtgattcatgaactaccggaatgtaaaagggttccttgctccttccccggccccagccctcagcccagtggtgcctcaggcttgatggctgcccagggctgctgaccacgctctcctggtgccgccctgcccagcaccgatctgggacaccacgggagcctggaagcaggggctgcacccctcacgtcctccgatgttcagccaggtgctgggctgggtatcactgagcccctcgatggccactgctcgacagtggaactgctcccggctctgctgaagatgctacctcacctgccacctggcccagggccacttccagggaaaccctgcactggcgtctgtcctctctatgtcatgggatcccaaaccaccccaggaggcacgtgtccatgtcccgcacaccttacagatgaggagacggagattcggagaccagcagcctgcccgagtcccacagctgcccagggctgcacagatggtgggcactgggactctgatccaaggtcaacccagagccagccccttccctaaggcgtgcagaggaggctgagcctgcccaggtcctgcaggtgttcagggcagcacagtggttgcccaggcccctgacctaggccacccttccatcctgaggccgtgcctgggcaaggccaagagatggtgctgagtgcatgaacccccttgtggctctgtgggatgggcagacctgggctcctcattctctgttgactcagtgggtgaaagaggcaggcaggagggcagccatgggggtgccctctgagtctacaaagcagagccaggacaggtgttcatgtgcccatttcacagatgagaggactgaggctccgatgggaggggtgatgacccacctagggtcacacagtaggttaccggctgacccatgcccgcctcttttcatgactcctcggccctaagggcttttcattcattcattcatccattcatttgttcagactcactcattcattcattcaacaaactctcagctgtgggccaggggctggtgtatgcagcccaggaccacctgccctagaggagctcacaagcttggagaacgacatggagacaccactgcccccaccctgtcaagtctccaaggttggcactctgcccagggagtgtctggggcagcaggagcatctccccacactcaggaaaagatttaactgaaagaaccatctgagagagccccagctgtgatccttgggccacagtgggaacatcacagtccctcactgaccctcacagtgaccctgaggcctaaagctgccattgcccacctcacagaggggacgtgaaccatgatggatgcaccagcgctgcccaggctccacccagttcaggagtagccgagttgggccttagcccacgcctgtcttcacatgccactgtgtctagctcagaccggggccagcccctcacgagtgatggcctcatgacaccgaaggagggttggtctgtgctgggggaacccctcaaggtatagggaagagtgtcacagtgggggatggggtgagaggaactcgtcctggccctggccctgcttagctgcagcctgggctgagggaggtgttctgagtcagatcagggaggggccctgtggcttcctctacagcaaagccagagcccagaatagcctgggagggggtgcaggggccctgctggaggagaggggggtggctgctcagggccctgcgggaggaaaagactgggagctactatgaactgagtgggtgactctcccatcaggcccagcctcctgtggggcctgcaaagccaccaagagagtgtccccagccaggcctggacaaaggcaccattacccttcaacccccatattcactgaatccaggggcaagaagggggacatcgacactcacctgggaacaagcaaaccagctcagatgccccataacgaggccaccagatcccaggcaagcccccattcctcaacacaaaggtccaaaatcaagtttccagccaactagaacatgcgaattttggggacatagaggaaataatcaccatccactcgcaatgcccactgctaatgacacagcacaatgctgaggatgttgctcctccctcccgacatgtcatcctcttctccagagtctctgtcacaccagggccaggttctggattccccacccaccccgcctgcaggacacgagtccttgatgttgaccccacaccctgggctccatccctgacctaaggaccagcttctacggccctgaaagagtcgtgtgtcatgacttgacactggtcctcttccctgtgctgaatgagacgtgaaggaaaaatgaacccaaatctgcccaggatcccctgcgccacacgtgagatgctccagttccctcggggattcagaagcatccctagctggcatcaacggaggccgggaagactaggtcttttcccaaaatgcttagttatgcaaacacctcaaaaggcacccgtacctcttgtaacaacccaagcgtgaggactccctctttctggggtgatctggggaaactgctctcctacatggtcatcttgaggattgcagatgggccacggaaatgtcaacacagtgacatcagcaggggcagtagggtcaggatcagggtcagtctttgtcacttggtcacttgggaccacatcaaacctgaccctgtttggccagtaatttcacaagggtggtctccccaggaaacacgtgggctgggcaaggtctgaggggagggggatgacctgcatcctgcattttccaggacattcccagtttgtgccactgactctggaagctgaggtggatgctagagcagtgtccagcccctggtgaccctagccccatccaggtccccagaccactggccaccaatcagctgcagtttcccaggtgcctatgtgtacccagcctcagctcgggacccaggcctggccgtgcctggcccattgtagcagtaatggtgggctctgcccagagacccaggcctgggctgcctccaggacccccacccacatctatcagagagactcgtgaagttattaatagtgccccttccactcccaggaacatcccagtttaaacaacaaactttggttgcccaagctcagagtaaccgtttgctaaatgactgaatgacgttcttcataatggctaataatgagggggaggaagccaagcccagccacctagcactatggtaagcagtgctggacattacaatgggggccaggggccaggagagcctcactaggggccacatccaggcagtcaccatgacattcctggtcccctgcctggagcccctagaaatgagctcactcaggcccagctcacaacacaaccaggggtggccctaataccatctcccactcagcaacagcacaccacgtccagagaccggcaagggacagctcctctgggcagccctagttcctggggagaccacaggcagcagggagaatgcctcctggctttgggacaggagccagggaggggctgggtgacttctgtggctggcaacacagagcccccgtgtcagctccaggaaagagtagcccacagccaggacgacccaccagggcacccgcagtgtgcctctttccatacaggccatccttcatggtgactctctcttcctatagcaacaccaacacccttgatctggccacgggtccctcctgcttctcacatcaggtctgatgtccactgagcatccaatgtgccagttgccgtgccaggcaccaaagcctggacccctcacaggtgtcactaggatgggccctccctgcccacccagttcccagcctgtgcagggacatgttgggactttctgactatggaaatgatagaggagaaaggggcctcatcttcacagtttcaggccaaaggggagcctcccactcagacccctagacacatcctctcctgacctgtctggggaggaggatgggaagtggtggtcagacttggcctgggctcccacaggggacagaaagtttgcaaaggtctgggcagcagagagcagctcccagaaggaaggggtgctggtccccaggggctgctgggcagagtagctgaagaaggtgagaccccagaccggccaggtaagtaagcccccttctcaggggctgcccagagcgaagtcacatgttcagctctcttctgaggacctgctgctcctggaaacccagcagggttaaggcaggcacagccaggttcagacagctcatgtttgcgggagagggaaatcaagtcaacagacaaggaacaatgtcatgtaggaggcgggatttgtgctggggagaaatagggcagaggatggggggtagggagcacctggctggggtctcacggggggcgacgtcccaggggctggaggcagccagcgactgaggagccctgactagcgccaggcccctgtggctggagttagtggctcgagctcagcctcagtttcccctctgtgcagctgggttgataataatggaaactgactctctgggtggggggagggacaatcagatggaaaatagatgttttgtttgtctctgccgttggttgttttcatccttgggctgttccagccccagacagcctcaggccagccccctgcccatgctgggctccccaccggccctggaaccctcaccccagtgcagctggcctggtgaaaccaagagtgcctgaggcccgaaatagctgggaaaccccaccaagcctcagccctggcagcaggtgcctccttctccccagggtgggaggcaggggggcgattcagtttccaaagcttccaccagcccagctggagaatggtcctgtgtccccgcaccaagacacccaagccccgtgcccaggcttgagttagacagggtctggagatcatggtcaatcaatgatcagaagtagcaccttctgctccagaagcttctattcatgcaggccctaccccctcctcacagctccccaggaaccgttctaaatgccaggttcagagctgtgcccaattggggggcacagccagacacttggagctcagaggggcctggggtgggcagggctggccagagctggacatgggaccctgctgatcacactccacctgccgcccccaggtcttggacccttcaagggagctgggccaagtaaggggatgggaagggaaacaagaacccttccaagagcttccctgggagcccagagcctgaggcagtaacgaagctcctggaagcacagctgccaagaggacttccggggtccctacccagtgggcaggacctcagactggtcagtcacttatttgtgtgtctgtccatccatatatctgaacatgcacacacacacacacgcacacacacacacacactcatccttccacaagccccgaggcctggcctgtgcagggctcttgacacatggtgtcccaggcaaggcaggactgccccagcccacccccaggtgagacctggagtgtgccttctcatgggaggagggggctgtggccttggggtgccccattccctgtccagtcttccccatgctgggtctagatgctgaggtcaaagagaggttgacaggtgtgaggaacaggccactgtggtgaggcttaatgccccctgtccgatgaccagatcctacccactgcccccgttacagacctccctgtctttctccatgtggaggaaacgttcccaggatattccagggctccaggttctgatgagagtatgggaggagaccaagtacccagcctcagggcctgggttcacccctgcagacggcaaatcccatccacctgtgggacttcaccagctcattcttagaggacaccagcctggagctcccttggcccaggaaagccaggagccaggcccgccacacgtagccattgcacatgtcacctgacacataagatgcgaactgtagggtgggcaggccagggatgagtgcccccacctctgccttcctccccacaggcccacccacgaggctgaacagggtggccctagacccagcaccatcttcaatcagctcatccactggcatcccccaccaccgtcccctcaacatgcacaggatgccagccacccaggccagttcctgaagtaaagcaagcaagggggggtacttgtccccgcccagcccagagctcagattgcagatgagacccccttgcttgaagaagacaaggggcaggagatactggggattccatgtggtcatcaaaggtagcctggtggcagcagcaacctcaaacaggcctaggagctggatcaaggactgaagggcagagagaggacgggtgtgttagggggtgagtgtgagcaaaggtataggagtgaccacagcatcccttcttcccacagggccacagtagtgcacaagggccctcatggaagcaccctgaaagctcacctcaaaggccccatactctgtcccccacgtcacctggcctgccaccctacttaatacccaggaagtccttggagtctgtgccacatggatgggctccaagatggaccaggcttccaggggggcagggaacaagggagaaaagaggtctgggccctgcataggacacaggtagtgaccacccggtggaggagagggaatgagcagaggatgctgggagccaggcccaaggcagggccctgcagggtgcacagttctctgggttggacggtggaccaaggccatgaacattcatgctggtccaggccagtggaccagagtgccccaagccccagagctctgcagaggggcaggggcagggcccagagagagcaaggccgagagtagaggccctaaacctcaggtctgaccagatctgcaactctacaggtagctgcatcctgtgttgagacgctattgagtggccttattgtcccgtaccatttataaaacacgtggacacatgttatccacctgagccactcagggattctgtgaggccacagccagaatcatggtcccatttcacaggtaggaaaactgaggcccagagcagttagatcccaaaaagccagagccagctctgtggtgtcctgacttccagcccagggcctcccatctgacaaatggagaaacagaccaggagagaaagggatctgcccgagctcacataggcgcccctgtgtggaggggcccatgtagaggggcccatgtggaggggacctgtatggagggtggcatgtggaggggcccacgtgtggaggggcccatgtgtggaggggcccgtgtggagggatcgtgtgtggaggggcccgtgtggagggatcatgtgtggaggggcccatgtggaggggcctgtgtggagaaatcatgtgtggaggggcccatgtggaggggcctgcgtggaggggcccgcgtggaggggcccgcgtggaggggcccgcgtggagggatcatgtgtgaaggggcccgcatggaggggcctgtcggtagggtgccaggtagaggggcccatgtggaggggatctgttggagggtgtctgtgtggagggggcctgtgtggaggggcccgtgaggagggcgctgtgtggtgggacccgtgtggaggagcctgcatggagaagacctgtatggagggtggctgtgtggaccactgccctctgccagagaccagattgttcacttcctccaccattccacagctccagccccatttcaggggtgcagaaaagaggcctgaaagcagcatggatgagagttagggctacaggccctgatggccattccttccctgtgccttgggagatgcaaggaaggagggtggctgcaaaggcctgtgggagcccagagcactgttcttcccaaaggggcatctgccctgggagcccagacctcagtgtcagacagagaaggggtccccccaccatgctcagccctcatcaacccttgaccttgagcaatctgcttctcttctgtagccctcagtttcctcatctgcccaagggggtgataagagtccctccccacaaggtaggtttgcggattgagatgatgcctaagctgtgcctggcctatggggaccctcacctaccctcagtcattgctcttgcctgggcctgcgggtgacactgtgtgaacctgggcaaatgcctttgccttcctgggcccagccttccctctggtcaaggaggaactgggtcagggaccccgagtgccagccattcaggaaaccagcagattcctgggtgaaggggttggccagggaggcctgagatgggagtagggtgggggccaggccaagggatggggttgggggatgcgctttcccagctctggtggccctgcctgcagctggccacccctggaaatccccaggctaaatttaaccccaagttggctgaaaccagaactcagagtgacaaaaggagaaaaataagaggaagagaaactgagctcatggccacccgggcatgggatgagtgacaaacaggcccaggtgtggcccaggaggagcatggggcagtttcagggctgctgctggatgtttgtgcagctcacaggtgggggcagtagagcctgcgccccaccccaccccctcctagtccagcccctgggcctgatgctgccccctggctgcctccccacaccctgagctccatcctgggtcccagggtccaccagaaggcatctcagaaccagccagcagtggccctgattgtcagcaggaccccagggaggggggtggccaggacagggctctgaagcccccaccccaggaccttccctgggcagaacgagttggtgagggagtgatgagcaaccacaggcctcctaacttcccaagctggcgattctgagaggcctcaaggctgagacacggttcagccttttaggccctcctgaacgtgtcccctgtctccacagcctgggaatgcactctcttttgacccagaaatcctgctcataagaatttatcatggagatgccagagggccagtgcatgtggatgttagccagggagctaagagcaaaacgtgacagaaaagagcccgagagcagatgccagcctcacatccacatccccagatggccttggagaagggtcatagacagatgttcacaacagggcaagaagaagtgaggaaagaagttcccatctttgtgataaccccatgatttcatgcagaaaaagatctggaaggcgccataccaacgcgctaacagggcctcttgggcagtgcaggatcagagacttgctttgtattcttatttaatttttcctgttttcagattttataatcggagaacaaaacattaaaccaatttaagatgtaagatcctataaaaatgctgtattcgatgatgcgaatggcatctgaaaagccttgaacatattatcccaaagaggccaccagataagacgtgacctgtgtgtgcatgaatccctgcatttttatccatacctagatgcacatccgtatccacatctattccccggggctaccggttgcgggggtaaactgtaggtaatattggttttcattttgtacatctaacttttttcattttttgacaatcattatacatttattattatgaaaaatagaaggttttgtcacttaaatcaacatgtttattccaattcacttaacattcagcaaatatttcttgtgtgtctgctacacccacaacagtcagggtgcagggtttgagattacactgatgagaagacagagtgttctctcttgaggagtagtacaatgggggattatatggaagaggtcactacgatcctaacatggattcgcatcctgtatgtcttaggtgctgcccaaagcccgaaattgtctcacagctccagccagctcagaggcaggaagcccagggaaagttgccgagtcataaaaatggaaagagagggcattccaggggggatgagtacctagcagccgacatttagcaaagaggattggaaaatgaacccccccttaaaatacagttaaacacagaggagggagcaactgcaaacaaaaagtttaagcgatttctgcaaagagcaataaaagccatagagcagcttgggacaaggtcaggtcaggatgagcagaagttgggaaggaaagaaggaagccaggatggacttggagagtttttaccagttcctcaggcaggaagaattgtatggtaggtcagagcatatttctaggaagacctcggttgacaaatttctctgccactgagagatgacaatttaccttggtaactaatctctctcctcatgttcccatctatttgatattgatttaatatgagtagctacctcccatgtgtataataggaaatgtatgggagaatgcatattaattcctgaatagaatatctggttccatgaatgatggaagttggttagaatttattattggaaactcaccctgcactacctatagttggtttattttaattatacttatattcattatatagtaactcatatatatttgtcatttcttttcttatattcaaaaagtctctacataaataaactctgcacctatggtcattgctgggtatctgttctatacacagcaaggagccagacgccctatcttacttgttcactttccagcttctccttagaaaaaaaaatacaagtttttaacccaattctatgagtctagtactgtgacccaaaacccaaagggcaggaactcaacagccacctctccatcctgcctgcctcccaacccacattccccttccagaaccctcactgatgagggaaaagatgatgtctccaagaggagcagcccgttcacacatcttcaagcttcatctccccagcagccatccaagtgcctgaccttcaaggctctcaataaacagtctgaatgaggaaagaaagggagggagggaaagaaggagggagggagaaaggggtaggtggatggatgtatagatgggtgagtgattgatgggtggattggtaggtgaatggatgagtggatagttgggtgggtgagtggatggctggatagatgaatgcgtggactggtgggtacatgtgtgggtgggtagttggatgggtgaatagttggataagtaggtaaattctaaccatgagaagcacagattggtatctggcaactctgtgtagagattagattccaattcctgctctgatcctgactcgggtgtgatcttgggccctttccttaatgtcttgaagccttttcccttcatctgccctgcccatctcacaaactgctgggaagaaccctggaaggacatatgtgcacgaagatgctttagaaaccctagcaagcttctcaggtgtgaccttagcattggagggaacttgaaggtcattgggctgactctcccgatggttggatcacagttcatggtaagagcctaagcttagagtccagacagacctgggtttgtgtcctggctccaccacttgtccgagtgtgactgtcctgcctgtgtactcctctgtgatgtggaggtgatgatggtggcagcttcccctcagggctatgtgaggattcagtgggatcatcgtggaaagccctgggcacatcacccagcaggggtgccacgacgaaacccaaggtctgccctccggggtcccaaaaaagaggcccagtcttgcctttccagagcagggtaccctagaggccatgggattgaaggagagctctaggatgtccagctcacgggttcacaaaaccctgaaaagtgtctgtataaatgctcattgcagggaaagatctgtggctttatacagaaagaggccatgacacataaagggttaaccacagtccatctaatccaggactctcacttaggaaactgagacctatgtcctgtccaagggcactctgtgggtcaggggacagcaaagcacagacattcaacccagcatggaggcccctccccacccaggagcaggagcctgccttggaatgccagacctgagataggattactgccacctgggaacagcatacactggtgagaggcaggggcagggagaacaccaccacaggggcagggagaacaccaggatggggaaagggaaccacagggcctactcttttaattaagcagtagaattgtaagaaaattgcaactttcttttaaaacctgtctttcaaggttgttaaaatggggttttaataacaaaactgtgggagaaagaggtggctgatgtcaaaaacatctcaacccactcccctgggggacctgcagttctctagttcgtgagtttctgctaacaaaaagcacactaaaagaggggccaaaacaaatggaaatcaagcttatcaaacacagatgacatggagttgaccaaagcatctagagctgagattccaggaagcagatctctctcctttctctgggaccatcctaggagaggttccagggccccctggcacagaggtgccaccagcgacctcaaacttcaggcgcaggtgggggcaacaggcgtagttgaggctacagggacacaggtgtcagcacagcatacgagagggccaccttgtttgttttctgacttcctcttaaaatacagtttatcgcccttgatctttagtttcaaatagtaactattcacagtaaacaatgtgacacagtaaacaacgtgtacagaaaaacaaacaggagaaaacaatttgccccttgtacttcacccagaagagccactgctaatattttgatgtatttccttctattttagttgcaaactgtaacaaccattaaataaataaatacgatgaatttgtaaagtttacagagtaataataggagtgatgattgcacaacatcgtgaatgtactaaatgccactcaattgtacactttaaaatggtgaattccacatgatgtgagtttcacatctattagcctcctgggctaggaatactgcctagacctcaggaaccacggaattcatcatctctttccttttccttaaagtttgacctcctgtgtgtgcccttcaacaaacggtttttcagcttgtcctgcttttgaacttcatacggattgaagaagaccatgtgtatttttcatggtttgcttctttctcaacactgtctctttgatattgatgttgatgaattactcatttcactgctgactagaagcccactgtgtggaggtcccatcactcagctgtccactctgctgccactgacacatgggcagttttgcccaggagcagggcatcagaaacacccaattggagtccagtgtgacagtttgtccagggcctgtcattgtacaacacatcatttcactttgtttttcaaacatagtgaattctttcctaattaaagaagaaaagagtataaagagaaagtttccagtgcagcctggagatctgtactggttgtatctggaattccagactcagccttgcatttcacatagcagatagatgatgatgatggagaaggagaagaagaaggaggaggaggaggaaagaaggaagaagaagaagaagaggaggaggaagaagaagacgaagggaagaagaagaaggatgaggaggaggaggaatagacagactgacaaagattctctactgttgtcacttaacaacatatccatgcaggtgtggataaacctgggtgcgcatcacactgggaacaagcagctccaacaacactgaggcagcctcttcccaagtcagctggacaattaggctgctttgctcaggtcgttcactgttctgagcaggacacagccaaagcccctcgcccccacctctgtgcaaggatccagtgactgacttggggttgaccctctctgcaaagatcaaaggtcatgcctgtctaaggccttggacgcatgtcccagactgacttccagaaaagagagcctgaactgccctgctgagtgcccaaagaggcccccctgcatccacgaaaggtacccatgagggtgtggaaggagaggcatccacaggaactgggctcccacctgccccacctgaccccagctctacactgagaataggggagatagaggggcccccagggcctcctccaaactccccagagcatccactgtgaggtgacctgaaccaggccccaagctccctcctcagggaggcctcagactcctccacctccgcagcctccaccgtggctgctctgtgtctctctctggcagcaccaaccacccccactgctactgacaccaccattggagaaggctcagggctatgagttcagcctctggctgctctggagatctagggaggcaggagggctgcaagtgggggctgggagagctattccaggtcaggggtctgtgggctggagtctgtgaggtgtgcacatgtggggctgagggatggctggagaggccctgttggtggccactgtctccaccttcagagcccaggaaggagatttggcccctcctgcatcagataatccctagctccttagttcccaagtcttcagtccccagcctggctctcctggggtggctgcccttgctgtgggaggctggggggatcttcagcccagcacctccagcagcagggcctggtgcccccagctctgcactggcccaggtctcagatcctgggctgtcagcccctcatgggtcccaggtgcccagcccagctgccccaggaggcaggggggtctgggggacaccaaaagagtcttagagaatggacctcaccactcagccacacagaaaaactgaggcccagaggggacaaaggacttgtcatgggtccagctgtgagcctggctgccagtcttaaggcccagtgctcccccacaggatgctgtcacacacacttggccctgatgaggtcccctcttagctgggatccagccccatgaccagcaccccgaggctgcaaagggtgctgggctccagcaccccaagactccacattgaccccaagactccacattgaccactctgagcagaggagcccttgggtctttggggaggttagagagctggcacccccaccccagtctacccggccccggggttcctctctggatagggggccccagtgcagttcacacaggccctgcacgtgttccttcctcagggcatgcgtggctgaagcttgctcaacactaaacatcccagcccagtttattgaatgtgagggatacgcagggtctgagcagagcagccatcccctcctgcctcccctccttccagcgctagagccagagtgactccactgtcctgtgcccacccccagaccaaggagcctcaggaccactcttggggcagggagctcgaggctataggaagattgccccagagcaggatggctgagtgttcaggagtccagccatgtggtaaccgtgcactgcagtgtcacctgaacagggatgtcaccacgtgaaggcatcccagctgcatccttggctgacatatcctaactgtgcctgtacaaggggctccacacacacacacatccacacacacacacacacacacagtcacacttacatacccattcatgctcacacatttatccacacacattcatactcattcacacacacacacgcattcacacactcacacccactcacatgcactggccagagccagagtcgatagcgccctctagtggccactgttgtcccttctctagaaggtctctgtcttatcagtcacaacccccaggagtcttcatccggaaatcccaggatgcacaagtctggcaagatc

SEQ ID NO: 29040 - DNA, 100000 bp, Homo Sapiens
ggatcatccacagcttaacacccataggaaatggtcccctgagagacacagaggaatggattgaggggacattgaggggaaatccataggctgaaggaggcacaaaacagcagagatggctcctggcctaacaccccaaggacttctatagggtacccttatattttttatccttatacttctgtctatgtaagtatgtctataggattaaattcctataggcggaaattattggtcgatagtgtatatgtgggcatggtggctcacacctgttatcccagcactttgggaggccgaggcgggtggatcatgaggtcaggagatcgagaccatccaggccaacatggtgaaacctcgtctctacaaaaaacacaaaaattagctgggcatggtggcatgtgcttgtagtcctagctactcaggaggctgaggcaggagaattgcttgaacccgggaggtggaggttgcagtgagctgagatcatgccactgcatcctagcctggcaatatagtgagattccgtctcaaaaaaaaaaaaaaaaaagcatttgtaattttaacagatactgctgaactattttgtaaagaggttgcacaacttattcttcccctcaacagtgtatgaaagtgcatgttttctttattttgctacaatcatgacattaatctattttgttttattttactttatcatagaaagaacacctaacatgagagctaccctcttaataaaattttaggtgtacaataaattactatggactctgggtacaatgcagtacagtagatctctaggccttacacatcttgcttgactggaactttatgttcattgaacagtaactttccatttccccttttcccacagcctctggaaaccaccattccactctttgattctatgaatttgcctattttaaataccttgtataagcagaattatgcagtatttgtctttctgtgatcggcttatttcatttagcataatgtcttcagggttgaatctattttagatacctcatataagcagaatcatgcagtatttgtctttctgtgattggcttattttatttagcataacgtcttcgaggtttattcacgttgcgtattgcagaatttcgtcctttttaaaggctgaatggaattccagtgtttgcacataccaatttctttttgtatttatctgtcaacggacatttaggtagtttccacattctggctattgtgactcctgctgcaatgaccacaggagtgttaacatctctttgagatcccaatttcaattcttttggataaataccctgaagtgagattgttggctcatatggtaattctatttttaattctttgaggaatctccatactgttttccatagtggctgcgtcattttgcattttcccaacagcgtgcaatggttccagctcctctatatcctcaccaatactagttgtctttttttttttttgatagtagccatcctgagtggtgtgaagtgatgtctcatggctttgatctgcatttcccttatggctagtgactttgagcattttttcatatacctgatggccgtttgtacgtctactttagagaaatgtctatagaaatccttagcccatttttaaattaaaaaaaattattttttacagttgagttgtaggacttccttatatattttggaggctaaccctttatcagatatatgatttacaattctttctcccattcagtaggttgtattttcactctgttgtttcttttgctgtgcaaaagctttttagtaagactaaacttctgatctttgctaacttaaataagtaaaaaataagtaatttaataagcatttttgaattatgaatggtgtaagcatgtaaacacaccagtaacagtaaaatccattaaaaaacacaacacttatttagtgcttaccatgtactctgtgctagacactattttacgtgatttacaggtatggatttttttaaaacttaaatccattagctaggtgctattgtcactccattgtgcataagcagaatttgaggcacagagaggtcaagtcaccagcccaagttcacacagctaataaatgatagaaccagaatctgaacccaggcaggctggatccaaaattcattgtcttaaacctctactatgctgcattaaaggattttgtaataggtcttggtatgaggtaaataaggggaaatttcctgccttagcatgtagataaagaaactctaggatcagggaacaaaggggaggggaaatgaagataactttttcagtatttagtctctgatgaccttaagacctgggataagaataaagcaaactaggcagggcgctgtggctcactcctgtaatcccagcactttgggaggccgaggtgggtggatcacctgaggtcaggagtcggagaccagcctggctaacatggtgaaactccatctctgctaaaaatacaaaaaattagccggacgtggtggcgtacgcctgtaatcccagctattcaggaggcggaggcaggagaatctcttgaatccaggagacggaggttgcagtgagccaagatcagaccactgctctccagcttgggcaacaagagcaaaactccatctaaaaagaaaagaaaaacaaaaaaagaataaagcagaataataatttaaaaatacttaaaatcaaaccaaagtttcccaagtaactagattttaaaatcctatttaatagaaaagaaaacggtgacttttttttttttttcaaagccttctgaggtggacttttgaaatgataaaggtgttttgggttatccttcctcagactctgttttcacccagcatgtctgagagccttgcaggcacagtggtatcaggacacactgctggtcgtggtttgcagatgttttcctggcgtaattcacatcaggatgcagtgtgtgggcagctcctgtttccttaggtgtcttcagaatttttcctctgcagctggagcaggtggttgcagattagactcacaccctgtggaccgcccagtgcctctgcttctgtctcactcagagatgcgtcagaacggtcagactcagagatgcgtctgcaccgtggcaccaagtgatgctgttctgaacccagtgtttcccctctgcctgaagagagattacagctcaaaatcttttaatcctcaagagagaagaggtggcccctgtgaaggaaggagggctgcaggactacctctgtcttctctcttcatctctgatacctcccttcatgcaacttggaatatatgtttattttcaggggccagaaactctttttaaagaggagcaagagggccgggcacggtggctcatgcctgtaatcccagcactttgggaggctgaggtgggtggatcacgaggtcaggagttcaagaccagtctggccaacatggtgaaaccccatctctactaaaaatacaaaaattagctgggtgtggtggcgggtgcctgtaatcccagctactaaggaggctgaggcaggagaatcgtttgaacccgggaggtggaggtcgtagtgagccgagatcatgccattgcattgcattgcactgcagcctgggtaatagggcgagactctgtctcaaaaaaaaaaaaaaaagggaggaagaggaggctcatctgatcatctgcaatgtcaaggatgggctccttcccacctacacagctgagtacatcccagacacctgcctcatgccttccacctactgcctgttcctttgagaccaaagaaaatcagaagagccctctgctgtacgaaggactaggcagtgtctatgtcattatgcaaaatggaccatgcagagcccaagccagagacacatatcaagctttggagaggtgtgtcaggacgcaaaggatgcaaagcttcagctgtgatgcttaagaattaacaagtgtcatatgttctgagacagaaggaaccatgattttagccaatgggataaaatcctgccagaggatagggtcaagagagggttcctatttagcaaatcaaagggaagaattttaatgcttcaattctctggattatagtgatgctatgtgttgaggcggaagataggaacaaaggggtctttgaagatggaaaatgcagattgcacccagaggcctctgagggatggcctggcagggagaggccctctaaggattgccccagtaaagaatgagtcatagctgacctcagggccgctggagccacagctgacccacagtgggttttcctcttgggaagaattccagaccccttatttctccttgagagaattccaagagcccaggtttcatcaacaccatcatcccctgactcccttgtggttttcacggggatgcatgttcaactttttctcagagcaaagatgtatttatgctgtttaaaaatatatgcacacagttttatgtataatgtggcatcataacttgtagggcatttactcttattttatacattcagatatgtttggttttttttttgaaacacttcttaaggctacacaacaggacagagaaaaataaacaggaacatattcaacaattataaaacatgatatgataaagaatataaagtactagtttcctttcaatacttcaaaagatacatatataaactttaaaaaaatgctcaacatcactaatgatcagggaaatgcaaatcgaaatcacaatgcgatacgaccttgctcctgcaagaatggccataatcaaaaaaataaaaaaacaatagatgttggagtggatgtggtgatcaggggacacttctacatggctggtgggaacgtaaactagtacagccactatggaaaacagtgtggagattccttaaagaactaaaagtagaactatcatttgatccaacaatcccactactgggtatctactcagaggaaaagaagtcattatgctaaaaagatacttgcacacacacatttgtagcagcacaattcacaattgcaaaatcacagaaccaacccaaatgcccatccatcagtgagtggataaagacactgtgggctgggcacagtggctcacacctgtaatcccagcactttgggaggccaaggcgggtggatcacctgaggtcaggagttcaagaccagcctggccaacatggcgaaacaccttctttactaaaaatacaaaaattagctgggcatggtggtggcacctgtaatcccagctactcgggaagctgaggcaggagaatctcttgaacctgggaggtggaggttgcagtgagccgagatggtgccactgcactccagcctgggttacaagagtgaagctctatctcaaaaaaaaaaaaaaagaaactgtggtacatatatatgatgaaatactactcagccataaaaaggatgaattaatggcacttgtagtgacctggatgagattggagactattattctaagtgaagtaactcaggaatggaaaaccaaacatcatatattgtcactgatatgtgggagctaagctatgaggatgcaaaggcataagaatgatacaatggactttgaggacttcgggggaagggagcgggtgagggataaaagactacaaataggatgcagtgtatactgcttggctgatgggtgcaccaaaatctcacaaatcaccaccaaagaacttactcacgtaacccacctgtgccccaatacttatggaaaaaaaccccaccacttatggaaaaaataccacctgtaccccaataacttacggaaaaaaacctaaactttttttttataagtaacatcacagatgctcacatcttcacatgcttttaagtattatttgtactcagtgtaaggctattatcatttttcatacataaagttttttttagctgtgtaacaatgcaatttgtaatccattcaagtaaattcagccccaaagttgttgcttcccagcattaagtcctgcgcccacccctcttctaagattttctaaaacttgtatttcagaggaaaaaagtgtagctgaagggaatgcatatttgatgcatatttggctacacgatttctgtttactgtattttgcttcctattttatgtctaaatcctattattttcatttaaaatcttaataatggctcatttccagtatgtcaatttcaaagacttaaggttttgctactagtatcagccatttactttcccactaattgggatttttttttttttaaagagtttatttatactcttttagagcttgtcccatggtccttctggtttccctctaccacttgggagggatgactcctggccacacccccattggttgacttgttttccagctctactggaaatctctgggatttgggatatacagtcagaatgtttctgtcaacgacagaccacatatacgggcggtggtcccacaagattataatgatgctgaaaattcctattctctagtgatgtggaagtggttataatgtcgtagtgcaatgcattaccttttctatgtttagatacacaaatattatcgtgttaataatagttgcctatgatactcagtacagcaacatgctgtacaggtttgtagccaggtgctataggctgtgctatacagtctaggtgtgtagtaggctctaccatctaggtttgtgtgagttccccctataatgtttccacagtgaagaaatctcttaacgacgcatttctcaggacgcaccctgtcttaaatgatgcatatgttacaaactagcgtaactttttttttcttttttgagacaaagtgtcaatcttgttgctcaggctggagtgcaatggcgcaatcttggctcacggaaacctccgcctcccgggttcaagcaattctcctcctcagcctcctgagtagctgggattacaggcatgtaccaccatgcccggctaattttatatttttagtagagaccggttttctccatgttgttcatgctggtctcgaactcctgacctcaggtgatccgcctgccttggcctcccaaagtacagggattacaggcgtgagccaccgcgcccggcctagtttaactttttaaagtgcattttcttgttgtcactgccatagtatttaaatcttttcctttgctggaacacaaagaccttcagtaattttcttttcaccacaatttctcatccagtaactaagccccttcttgccctctccttaggcccagcactgacggggcaatgacaccgttgttctcaccgggggccatgatgaagtgaaaagagaatgggcctagcagacatgagactgaatcgagcctttgccagttcactaactgtcaatcagaaaatgtgcaaatgtacttcactctagttttctcatctgtacattgaggcaatgagtaaccacctcataggtggtaagggttagataggaaagaacacagtagaatgcctagcacacctaagtactcaatcaatgttagttctggacctttcatttgaatactgcttgagctctgtgcccaatctccctttcctggatcaaataagatttttctttgttagtgatttctttctagatacttccttggccagaactatagatcctctgtctttcactaactcttgttgatctatggttctcattcaagtttgtgtagaacatccagagatttcagaggcattgtttactcctgatgaacagggaacattgcgtgtccaggaaccagcacactgcctgagttatgggggatattcaggaagcatgctgaaccaatgaatgaatgaacaaatgaatgaatagctgattctgactagtcaaccaaaacttaattagcgccattgcttccagatgttattgcttctcaagggagtatgcaatgtgaaagaagaaagaaaaaaaggcgcctctcaatcgtcaaatatcagtagatgcattggttttattaactgatattttctcttcaaaggaaaggctgattcagtcttgcacaggcgaaagatccagtgggtcccattggttctctgtgtctcctgctacacaaattactgacggaaagatttgagccttcattgtgaccacatccacagagaccatagtccagagagagcaattggggcctgaatcaactgctggtgtttgttgagcagaaacagtgagtctctgacttcccaccaacagctaacctgatatggaagagccaagaggcatctcagatttgtcaacattgctttaatgagctgaggaacttctcatggtaaactcagcagctgagtaacaggatgatggcaccacaacaggtagataatcaaggcaggaggtcaaagcactggagccaacacccgcccaggatggggtataaaagggttgggaggagaggaggcttcagtctcagtggctcagccttcccagctgatctgaagctcctgtgcagcctcagccctacaccatgacctccttctacagcacctcctcatgccctctgggttgcaccatggctcctggagcaagaaatgtctttgtctctcctatcgatgttgggtgccagcctgtggcagaggccaatgctgcctccatgtgcctcttggccaacgtggcacacgccaacagagtccgtgtggggtcgactcccctgggccgccccagcctctgtctgcccccaaccagtcacactgcttgtcccttgccagggacctgtcacattcccggcaacatcggaatctgtggggcctacggcaaaaacaccctgaatggccatgagaaggagaccatgaagttcctgaatgaccgcctggccaactacctggagaaggtgcgccagctggagcaggagaatgcagagctggagaccacactcctcgagaggagcaagtgccacgagtccaccgtgtgccccgactaccagtcctacttccgtacaatcgaggagctccagcagaaggtgaggtgtgggatcgcctgggcatgctgggtctgagaaggcagaagccttcgcaggaggaatctgcataaggtccagagagctttgggttcttggtttctcttggacatgagcgtaaataccacacatggagtgggagcttagagtatggtgctttgtgtgtgaaccgtctttccgttttcctcagatcctgtgcagcaaggctgagaatgccaggctgattgtacaaattgacaacgcgaagctggctgctgatgactttaggatcaagtaagtcaggatgaggagggtcagtgtgacttctctcctgctgtatttccaagggcccgccccattactcagtctatattgtaggtgttcaaaaacagtttttgactagaagaatatttctctccacaccttaaattagcctgttgctagaaatggtcattatataggaggaaagagaatataagcattgaaagaaaaagaagggctgtagtctagattggttagaacctatgtcactttctcccatatctagaagataagaggattttgcttttcaatcagaagtaaaattgagtcatcacaaaaataaactgtcaatgcataggttgttgctagactctctgactcttggccaaatccatcagctggaggaattgtcattgaagctccttggtagctagagttgtgcttgaatgaaggggaaaagcaagaaaacaacgagaaataatgaatccaagaggaaaagcagcaaactgaaggtccagaggcttatttttagccattctttttcctggccaaatgactcctattatggcagaataaatgctgcatttgaagtcagaacacttaggatgagtccatgcatttactattaactgggcatggaattctgaacaactcgtgttttgtttctgagcctcagtcttccatctggtcaatgggcataatgtcctgactacaaaccgtgtcgctgcagggttgagaatagtgtatactgcccacgtgaacaaataaggatccaaggtggtgtgggaggtaggaagccagggcagctgagaggggctattggggcattctttttgaccctgtgcctcctgtgacggaaggctggagagtgagcgctcccttcaccagctggtggaggcggacaagtgcgggacgcagaagctcctggatgacgcgaccctggccaaggccgacctggaggcccagcaggagtccctgaaggaggagcagctctccctcaagagcaaccacgagcaggtgtggccctggctgctcagactcctggggagggcgctgggcagacaggggagctccccggccctggggctctcagagcattgcctgggctcagctggcctaaggatgcagggctgaggtgggtctgagggtccagagggcctctgtggaaagtgcagacttgccttgggcatgaggaaggtgtccaggtgggctctcccaaatgcactctggacaagactttcccatttgcttatgtgtgggactcccctcctactgcttgccagggacggagtcctggtgctgtctgctccatcaaaggccgtttccttacgcaggctgtctatcgcttccatttctgcaggaagtaaagattctgaggagtcagctgggggagaagttccggatcgagctggacattgagcccaccattgacctgaacagggtgttgggggagatgcgggctcagtacgaggccatggtggagaccaaccaccaggatgtggaacagtggttccaagcccaggtgagtgggggttacagagccagggagtacctggcctccatctgagcagggaggtgactgtgtttctctgtgctccagtctgaaggcatcagcctgcaggccatgtcctgctccgaggagctgcagtgctgccagtcggagatcctggagctgagatgcacggtgaatgccctggaggtggagcgccaagcccagcacaccttggtacgtgtccttcaccctcactgcactgcaaatgccccatgccatgtcctggtagtagcatctcttaaagtctcacaaatcagttccttcaacattaagtcaagatctggggtcctctatacccgatggagacgtcttgctgtcaagttcagtgtgacccagggaaatggtttcttcagaaaatcaagtccacttcctttacaacacagtgcggaagttcaggcactcactccacaagattttacgaggtgcctgctttttgtcaagcactggggatacagggatgaacatgacagttccttaagttagatttgtgtgcatgagagagaagtcatggtcatgttgacagtgatttctccagagctctgagaatgtcctatgacattttggaatttgccctatgtgtgatgagtttggtcatgattttcactgctgagttttggggcacctggatctcttaccccattatttcccattacagaaggactgtctgcagaactccctgtgtgaagcggaggaccgctacggcacagagctggcccagatgcagagcctcattagcaacttggaagagcagttgtctgagatccgggccgacctggagcggcagaaccaggagtaccaggtgctgctggacgtgaaggcccggttggagaacgagattgccacataccggaaccttctggagagcgaggactgcaagtacgtgtgatctgggcaattcctaagccacacacatgactgtcaggcaattcctcagaggtaatggaagtgcttgcagaagatatcatcttaacaaacaagccttcctgtgctctcttgctcagtgactcattaacctctcctggtctgtgcagactggattattgagaaaatgttctctaaatgatagccaggtccctaagccaaatcttccccaaggattcctggatgtagaaagacacagatgagagaactgttggtatagattctctggtctgtgtgccttgttggtggcaggcccagccttcaccctgatcttacccttgtccatcaatcactgagacatctttttaatgtaactcttctttctctccctgcagactcccctgcaatccctgttccacgcctgcctcctgtacttcttgtccaagctgtggccctgtcaccggtgggtctccctctggccatggagccagcatggggagatgattctgaaggcccgagttaggagattgaggctggttgcactggggtcaggagtgccctcaccttgcccagtcttccttcaagactagactcactgaggcattttccctaaatcaaccggtagcagatacttccaaggagtggctccctgcctatgcctctaagctgtattttttgttgttgctaaaatgttgtaattatcttccatgaaagcaattatttttcctggtgtctcttcttggtacttttagttctattccagtgtttcagaatctccaaaaatgtaactgggttccctgcattaaatggtcaataaacctccttcctgcaccaagtgctgtctccccggtgttggttgtatgtgagatgtcggagagtcctggtcgtcaggtcctgtgtcctcactggctctgacatcttgcttccaggagctccctggggtgctctggggcctctggatgaaggtcccttcctgatgttggatgtgtattcacctttcccagggatccctatagactggtggaaggaagtgatgccagttgccaagtttgaattctttcagaacagctcagagctaacatgtccctaccatgcttttggcatcttcagcctcttgttattttgtccaagagcaaaatcacatcacttagcattctaatatcgtcaaaggaaggtcgtgttgagaattgtctgagccaagttgccaagtttttcctctcactccagttggcccctttcatggagccatggaattctcgcccactctcccaaatgcagaggcccagattgggcactggagactggggtcttggtcctggggcacttctaggctttagttttctctagagagatgctgccactgatgtttctgttgtctattctgctgctgtcttggaggtgctggcggtgagggctgccgctgccatcagagcactccaagtccctgcctgcctctcagatgtggctttggcactggccaaggtggttcacagccagatgcagttataagcaggtggaggagcagcccagagaggctgctgcctcccacgccatgctagtcagtttacggcaagcaccaagtgtgtccagaagaatgaaactcttgggtctcagcttgtccatgtgccctggtgcaaagagcaatgaaaaactggtccttcttcatggtggcatagtgtggtggaggtggatcttctctagggtcagggaaacttgggttcaaatcccaccttggtgactctgaagtgggatttgaacccaccttgctgagtgaagttggccaggtcactgcattctcttgagacctattccttgtttgtggaagtaggatagttgtatttccctctcactgtggttgaggggtaatgcatctaatgttcctggcatctagaaggtgttcagtggatattggtttattggggctccctaggaaccagcaggtacaatctcttcctcccagagagaaaaaggagctgaagagatagtagcagaacccactctcagcatcggggccctagattctacgttggtggctggaaagtttggccatattccttgttcatgtacatgcaataataaaagccatcttctgttgtcattaggcctgtttctcactccaagtagcctaactgaatccaaaaaagcattcattgggctgtcagaggacaagactgtttggtgggctcttctaatgaggaacccacaagagtcatgttttaagaagtggccatgaccctccctgaccctcagtgtgatggggttgtggagatccgacctgtccccacctttcttggccaggtcacacccttaacaagctctacctatgaggtcccatggctaggtgtgacaggaggtgccactcaggtacatagaaaatgaaggctagaggctggcaggtgggtaaccagtgcagtcaggacacctggaccctggggttttactcacattcgttatcctagcctgagagcttagggctccctctggtaccaaatcccagacatcttttcttgcaagtgattctcccgcctggacattctgtgcctgtccctggcctctctgcctcacatactctcaccgactggatggatatagccctgaatgtggcacaataggctttgctttggccacaataactgcaaccaggtgtctcttattttccttctcctgaggcttctgctcccttggctgggggccacatctggttctgagccacctagtgcttagcccgtccctcttcagttcaccaatcctgcactgcctgtgggctgatgtgtgatatttcttcccagccttcacgtggtaacatcagttgcggctcatgaggcccatgcacttatgtattttttgacaccaaatgccatttctcacaaattccagcaaagtggaaaggagaaagggtaaacagctacaggctgctggggtggacactgcagtcaccgagagagctctggggaagggcccactcctgctcccaccactgtctacactgggaagccaagaagattgaagtgaatttctggactttcctgaacaggagcattttttatttggatagtttttttgtagacgatgatatgtgatacctaaggctgatggtgtgtgccccaccctcccctccttccccccagcatcttctctttgtcttcctgaccaagaacaaaatcaatttcatctgttctcatggccacttataatcttcatgagctcagcttgaagctcatgaagttctcagcctgtttaaattaaaccatttttaatgtatcttttttctacctaattcagtgtttcataaccatgccttcccacttaataaatgtaaagatatcttgccttctcacttaatgttttaactttcaaaaatgtaaataccaaactcgtatcatgactaaaagacagctcatttcaaatacaggttatgcttgttttcaaatgacacttcctctaactaaaataacttccctgccatctgttttagatattccaaacatcacctccccactggggctagggggtgatacacagactctcccagttagaatcaccgttcctattcaagtatgagcccctgggctaagcttacctgctttacctgcctgccaggtgtaatacgttttagcttctgaggaggagggtttctcagtgacccaggctgctctgccctggccccaggcctttgtctgtgaccccctagtggccagtcccaggtagctatatttcacactcatcctctccaaacttgaatgcagcttctcccgctctagccagctctttcctttgacttctcagctcccttgaagcacacaattgtcctaggaacttgggggtgaccttggggccactttcggtttctcttcctcctttgaccccatatacagtaattctccctgtcttgtagagtccttctgcagcatctatgtcctttgtgccttcctttacttcagcactgctggtggctggttttgggttccatcacatcctgcctggattcttgtaagagcctcctcctgctctcttctgtgccaggtttgttctgcacacaccaccagcccttcactcttttgtgttctatttattgagtaaatattatgtacaaggcactgtattgcatgctagagagcatacgaaatgaagatggagtgttcccactccagggtgcacactgggcagtggtaaaaggaaaatggggccgggcgcagtggttcacgcgtgtaatcctagcactttgggaggccgaggcaggtggatcatctgaggtcaggagtttgagaccagcctgaccaacatggtgaaacctcgtctctactaaaaatacaaaatcagccaagcatggtggcacatgcctgtaatcccaactacgccagaggcggaggcaggagaatcacttgaacccgggaggcggaggttgtagtgagctgagatcacgccactgcactccagcctgggcgacagagcgagactccgtctaaaacaataacaacaacaaaaacaaaacaaataaacaaacaaaaaagaaaatgaaatgtcagggctttctaaatttattatgccgaagtgaaaaattaagccttggaaactgggtcatgcgatatagctgttcttcttctctcctgcaaagacagttgcttcctgacttgtgtgttgacatgttgcatagtaaccagactcccttgtctgtattcaaacctagagtaaatgacattggagaaggaggcccttgtgactgctacctttttacaatagaatgttaagcaaccccatgagagtgtaatcaatagcggtcaatcagatcttacatctgtacactagcctttgtgtggaaaacgtcgtaattctgttcagcacctctatttttgcctatataagtgatcttcattttccccctgcactgggagtactgattgccattcttcggtgttcgtgtgtccccagaagacggctctcacatgccatgcttgaaaaaactctttttaaccagatcctgagccttttgattattttaggttgacaggcactggattaattttctaaaatttctcctttgattctctctttcatctgctcaaaaacctccagaggactctgttctgtttctagctcttcaggcaagttgtgtggcccagagcaggaacttcatagctatttgttgaataaatccagttggacagctggcatctaggagtgttggccttgtgttcagtccagagtccactatctggccctttctgggtcactgggcagagcagaaagaacttgggcttcagggtcaggcagacctgggctgacatttcaaggcccatacttttcattccaacttggtgagttcagacaacatccctaactgctctgagctttgttttctttactctacagtgggatacttgtaactgctttgtagtgtggttataaggatgaaaagacacaactatatgggaagcatatggtataatacttggtggcacatagtaggtggtcaaataataacacagtaggccgcacatagtaggtgtctatctaatttgcgtgtatagatttgtgaatgtgtgagagagaattaagtaaaatattgtataccaagtgccaagctcggttcccttcacataatagatgtcaatagatattacttcatgtgacctttatctgtcctttatgaacattgtttttcgcgtggactggcctcttccccacaggcataagcaacacagtgtgcatattttcctttttgtctctcctctctccttcatcctagatatcctcctaaaacaaacctcagcaaagaagagcaaactaggaaaacaaacagaacttgcttattacattggagaaaactgcatgctaactgatttgaagtacagtaatccaaacactggctcctcttgaattcatcaaatcctgttttgtgacctggtgcttcattcacctaggatgaagtcaccacaaaacttgtctattgctatggagcagtgattccgtcttccaagggtggtccccagaccagcagcatcagtgtcatgtgggaacttgttagaaatgcagactccctggcctgaccccagaccgcttgaatcagaaactgtggtgtggggcctgaaaacctgcattttttgcaagccctctgggtgattctgatgctggttaaagtttgaccactggtggagatgttatgaaaatagaagcagacaatatttttagcatagaggagtacaaacttcactcttacaggcttcagaaatgcaatttggctctttgggttgacattttgtgtcattcaaactcatttctttgggggtccagtacttgggacaggcctgttgttggctgttgcatttctgaagttgtacccagttctcttgagcccacttctgcttctgagtgttttcttgtgttcatcctctttttttttttgtcacccaggctggagcacagtggctcgatctcggctcactgcaacctccacctcccaggttcaagcaattctcctgcctcaacctcccgagtatctgggactacaggcgtgtgccaccacacccagcaaatttttgtatttttagtagagatggggtttcaccatgttggccaggatggtctcgatccttgatctcgtgatccgcttgcctcggcttcccaaagtgctaggattacaggcgcgagccactgcgcctggcctgttcatcctctttttctggaaaactgtctcccatctttcctgcccatccaagtcttcccaatcttaagttccagacaaagtgtctttgatggcccctctatatctctaagctccagtcacttctccctccactgagttacgtgacctctttttctgctctcagctttttgagggtggaaatttctccttttcatctctgcatcccccatccccttgagaagggctttggtataacaggagttcaggaatatcagacattcagagtaagtcaccaggataaggcaaatcatgccttggagaatatcacccacatctgtatagagttacagagaagggtccccatgcgtctcattgactgtatatgggaccaactggtggctggctggttgtcatggctgaatagccagtggctccagcatggtttacacaaaagtcctgggcaagaaggttttctggccatctactggcagcctttcaatctaaactaatcagaaatcccactgtacagcccgcacttaagagtgatagtaactgttacatcatggagcatgtccagggaaacattcctgggatggcaaggggactttgaaccatgctgaatgcagaaccaggagtaagaaatctcacatctgccacaaagagctgagaatatggcagaatgattagatttatcctgtatgggacaccatgggggagaactggagagtaaatgaactaaagggccaactctctgacttacttgccaatgtattactagcctccagctcagcccctggttggcacagagtaggtacttcatagctatttgttgaatgaatgaatgaatgacccaacaaaagctatagggagaggtaacacgaaggtagatttgtgaagactttctaaaaattctctataatgtgagtgccttaaggctgagctagctgctgttaattttctggataccagtgtcttgcacaaagcctgggaagctgtttgtaagccacaggaactgatggtgtaagctctcctggaaaatggtggactagatgactagttggaggaaggtcatcgaagggatttaatgcaaatgggtactagactagaggaccctgaagtccctttcgtcctggagatgctatgttgtagtgccagctgaaacacacttgctgcttcaagggccctcgtggtgaattcattcatcttaggaatgcggtcaaattagcatctttgttagcatagactggaagctggctagctgcccttttccagggtgtattgaacaaatggccactggcttatttgttttagaaataggggaggccataaaggttctgatgctctgagtgtgtctgaagattaaggaaatttaaattttgttctagagtctcccaagcaatggataatcaaggtagatgcatttcaaagaaatgcaaaaatatttcaaaagatgaaagatcaaagttcttgagtacgtatcttctgtaaacaagggtgatgagggactcagtctggtgaaagggtcaatagaaaggaaagatgcctgggaaggtgggtgaggccctgagaacagacaccataaagtgttaatcactgcctgccttaattagcctgtagactccagtacacagaagcataattttattttctgaaaattgcaaaccatcagttttattatgagccgtttttttctcactcccaaaacgcttatctgtttcacgtatgcacagggaaagtcttaattgccaacatctgttttataggttgtgtattgattttaattcagttcaaaatacttaaaaatttttaaattagatttcttatttaacccaaggagtattaaaaactgtgttagttttcaaacaccaagattaattttgaacttaggtttcattttcagttttctaataatttgtgtaaaggaactttccaccttttttctgctactttccttcaaaaggaagctggctatttatttttccttatacttgaaagtcgtcttccagggcagatccctacctttcactcacctttgcctcaagaccatggtcctggtatttaagacttttcacaacctggactcaatgcaactttccggggcttggggataatgtctccattataaataccaacacaactagactattttccattttccaaatgtttgattgtgtttattttgttctctatgagagaagctcattccccaaccctttataaaaaatatcattcaaaacatatttggaaaatcccctactccatgaagtctttttccggtctctcagtgagctctcttccacctcgaaatctttgcagctgtcttttaaaaaaaaaaaaatacttccttttactgtcttcataatatcaagatcatttacttttttatctttcttattaaaatctaaaatctccttcttacaagacagcatagatgtgcgtttgttccgcactgggcactctacaaatatctatcaaaacaaacaaatcatgatttttccctttcttcaatgtgcctgattgactaatattttaggttttgctgcattgggaacattcagaggtaggaaaagaatgtgggagtgagagagacttgcaggacattttaggagcctttagttcttgattatttcatagacataagctgacagaaggggaaagatttcacagccacagaaagtgggctgcttgaagaagaccttgttttctctgttttccaggaccctgcagtgatgggaagaaagaggttagggcctctttcatgagctcattaactctttataggaaacaaaaaccactgactaatagagtgattgtataacaattgacataaatattaatgaggaaaatgccagttttcttgcaccaacacccactaaggcttatataaggtctacaggagaaggaagattttggtgtcaagcagatccaactgtgggcaaagcaggatcttgccttttagcaccatgacttctgaccattgcagttccctcctcagcgggcaggtttcagaggccaacgctgcctctctgtgcctcttggctaatgtggcacatgccaatcgagtccgtgtggggtcgactcccctgggccgcctcagcctctgtctgcccccaacctgccacaccacttgtcccttgccagggacctgccacattcctggcaacatcggaatctgtggggcctaccgcgaaaacaccctgaacggccacgagaaggagaccatgcagttcctaaacgaccgcctggccaactacctggagaaggtgcgccagctggagtgggacaatgcagaactggagaccaaactccatgagaggagcaagtgccacgagtccagcgtgtgccgaaactaccagtcctacttctgcaccatccaggagctccagcagaaggtgaggtttgcggtgcaccagatcaggggtcaggaatctgcttactgcctgtcggccaaatccggcccaccacctgcttttgcaaataaagttttattggttcatggccatgctcatgcatttgtatgttgtctgcagctgcttttgtactacagtggcagagttcagtcattgtaatggagactgtagggtctgcaaagcctaaagtatttactatctgaccctttacaaaaaaagattactgaccctgggtcagcagtggattttttttttcttttaatgtgggaagagaatctcttgagtgaaggtgaatgggaatttgtaaaggatgagatgtagaatttatcactctaggattctgagttcatgcttacttaacttcagcacataaaattcctaaatcgtagtcacaaaaatcatgctattttcatgaaaaccatgcaaaaaccgtgctgagtttatgaaagttgcagtatactgaaacttctggtgcagtaaacagggcaaaaggaatatttcctaacatccttgccaaggcagtgtctatccacacaacagcatcaacctcttatgcatatctattgtcacctttgattatccagttaaagcttctgaagagcctacatcttagttttggagacaagaagacaaggaatgtcaaaataggggttacagaaacctggctagattcagagaagacctgtggggaggttggacaaccagaggaaagatcttctttagaacagatcctactttatctaaaacattcatagccagtcctctgttctgtggcctagtttttttttttttttttttgagacaaagtctcgctctgtcacccaggctggagtgcagtggtgcaatctcagctcactgcaaactctgcctcccaggttcaagtgattctcatgtctcagcttcctgagtagctgggattacaagtgtgcgccaccactcctagctaacttttatatttttagtagagatggtgtttcaccatgttgcccaggctggtcttgaactcctgacctcaggtgatccatctgccttggtctcccaaagtgcggggattacaggcatgagccactgcgtccggccagatcttcttatttatattgggctaagcatcatatctggcaaaatgaaagcaagtctttgttatatgttcagtttgctactgtcttccatctcctggttcctttgactctatgtcttcatccttttccaagaagtctcttgcacatcttccttcccacaccacaaaagcatctcttgcacgtttgggagtttgtgttgtccaggcggatgctgtaggttcaacttcagccaataaaacttcctctcacctgaggctataggtgtctctgggatcagtaagtcacttactgagcctactttcttaccccagattctgtgcaccaaatcggagaacaataggctggttgtgcaaatagacaatgccaaattggctgcagatgacttcaggaccaagtgagttggggttggacagggatgggaaggagccaagtgagagttggggttggatggggatgggacaatgccaagttggctgcttctgtctcatgtggcatcggatgtcattgacccagaccccaacccagtagttatagcagaagagaacaaagggcattaagctcaagatcctgaaaaactatccgctctccagtggtttagcattaacagtttacaacatgtgctagaatgcatcatccacctggtaagcaacttgtgaagcaggcgggcagggatagaatctcctccacaggtggggaccctgaggcttggggtgctggtgtgacttgccagaagccatgtgggtaccgagtggcagagctgggacttggccttaaattttgtaccaaattttcctttcttgaagcaatttcctgtgaaactgttgccttaataaggatatgtttctgtgctgcagcttgattaatttgtgagtgctgataattcatagcagaaatcatgctccatagcctaagatgaaaacatgtgaaagtcaaagggttgacaccacctgaggagggtctaccctgggtgctggaagggcattgtgttttatcatctttcttcggggcactgtgcaagtctcactcttctagagctaaagaaagccatttccttcctctcatgctggcaatgtggcttttactctaatagggaatccagggtccctttgggtatggggcttgtagagaggggcctgcagtgattgcactgtgttgcaaatgcctggttactttgccacctcccttttgggccattgtgtgtaaaggcaggtgctggctgtgtgtccatcacagtatcctcagtaccagctgctccccttggttcatctcaggtgcttagtattgactgagtggggaacatcctgttgctttctgggctttgagcacactacacaggataagccaactcacaattagatggcaaagggcaggccagtggacttacagctgcgagctgggagtcatgtcctggtgccccttcctgccctctaactgtcactcctgcactttccctgttacaggtacgagagagagcgctcgctgcaacagctggtggaggctgacatctgtggcctgcgcagggtgctagacaacctcaccctcgccaagtgtgacctggaggcccagctggagtccctgaaggaggagctgctttgcctcaagaagaaccatgagcaggtgtgtgacccttggtgtgatgcattgagactttctggaggtgaattcaggctcatctggggggaaaaaacggaggcttccttctgcttgggattgaagctttgcaggtgagctctggcttttggtgggagattgcttctcatccacagcttctggaagctgctaggctggtgcaggcagcggtttatcttcagaggagcacagggaaattactggggaggatggaaagtgggagttgagagtttgggtgaagggcagttgggggccctgcaggcgggtcatactcctctgatgcctacaggaagcccacactctaaggggtcagctgggagacaagctccggatagagctggacattgagcccaccattgacctgagtagagttctgggggagacgtgaggccagtacgaggccatggtggagaccaatcgccaggatgtggagcagtggttccaagcccaggtgagggggactgctaagcagtggggattggcctccatctgggcaggtaggtgaccatgtttctctatgctccagtctgaaggcatcagcctgcaggccatgtcctgctctgaggagctgcagtgctgccagtcagagatcctggagttgagacgctcggtgaacgccctggaggtggagcttcaggctcagcacacactggtgagtccctctgcacgcatgggagacccagcttggctcccactacccatgagtagctctctggggtcagtacaggcctcgaataccaaccacggactcagcttaaaccttggtttcaactcttttggaagcacttccctgtagatgtggatgctgagtgaatcaacattaacttaggtcagagggctctgatcttaaaggtctaccatgaagtgtgttagttattctggctgaagacagctaaagggagttagattgctctctggacctggcaatgtcttggggtgtcacaatcttaagaggttggagatccatgatttttaacttgcttcctcctttctttgatattatagaaggactgtctacagaactccctgtgtgaagccgaggaccgctaccgcacagagctggcccagatgcagagcctcatcaacaatgtggaggaacagctgtctgagatccgggctgacctggagcggcagaaccaggagtaccaggtgctgctggatgtgaaggcccggctgcagaatgagattgccacataccggaaccttctggagagtgaggactgcaagtacgtaccctgttgtctatgtcaacaccgtgtgcaaaaacagataacttctcttgggaatgacctaaaaggagctctggaggccaggtgggggtggcattgcagatcccatctttggagacaaacttgctaccactaggcctggtgagctaatgcctgcctaggcgtaggtgagggtgtacaggagttttcaggtcatggcatttgttttgctgaccacgttgtgctcccagttgctggctactcccatagagggctaaaatactgaatgcccagcacattcaggttttgctaaattctctccaggagaagtattccaataacgagtattctttgtgctcatagcatttaaagtattgctaagggcatgtgcactgactctttcattttagttccacaatagccctgtgaaaagcatcagagggctgatatacccctttaagcactaaggaacactatgaggggctgtgtttaaatggaatcagtggctgacatctggaccattcttgttcctctggcctttctgcctttctctctgctgtgttccttccatatgggacgtgaccctggcctggcacacaggtacactgagttctggccccagctccactgtggactgtgggcacgtcattgcccctttcaggcttagagggacctctaaggtctaaggtcctcttttgcactttaattctaaagtgtctataatatacttttgtctttcacatacttctcatgccaatgtttcaaacaccttttttctctatgcagatttccctgcaacccgtgtgcaaccccagccttcagcactcctagtccagcccctgcagcctgcgccccctgctcccgggccacccatgggccctgctcatcaactggatactgacacactcctcagcccgaggtgctgggaaaggggaggtgtcttcagctcgttaggctttgctctgcaggcctgctaacctgggccttgcctccctggccagccaggcaggagactgaagagagacagtgccactctgtggataggtgtttgaatccagcagctcagcccctatggctggatttgtttcttcccctcaaggtgtcccaagtgctccattttctctcttctgttgcctcctgatctctctgagatggggcaggcacttttgtttttattttgctattaaacttcgcttctgcagcagaatgagcccagtgcagtccagcctcagcatctccgtcccatgctgagagccttgctgggaactccttgagccacatgcttctgtagacgggggttgtggctggctcgccagagtggttctgggagatggcaaagccagtgaaggctagagttaaaaatgggactgcggcaaagtggcacagaggagagatacccaaccttggacctcaccaagtgtatttggagacagatttacagatagagcttttaaaatatagacgctaagtaaaatttcccttttatctggataagccacctggtccttgtgtaaaggaagagctcaaatctgcggcaccacagaccgttgcaaaactctgaaaatattaactgatggtaatcgccatcagtctagaaaggcccaaacaacctgacccgtccaagctccccagtaagctccactggtaagtcctggcagctgtctggcttggaatttgtagacagtagaacatgaatcagaagccccagaacaggtaacttaaattgagcttttaggatgacatgcccattatgaacaaggcactggctggggcttcgccgacattgtgtcacagggcaccacatcagccctgcaaagaagaagcagctgttattattctcagttggttactgagtcaagacttgaaacctagtctctttgaaccagatccaaagcccgttctttggaagctttgagggggaaacaaattaaacatgagaaggtttaggacagtggttcttaaagcgtggtccgccagcaggtagcactggcattacctgagaacttgctagacatgcacattcttgagcaccacccctgacttactgaaccagcattctgctttagcatgacttgcaggtgattctgatgttggttcaagtttgagaaacactgggttaggaagtttatttgaggaatgagcccttgactagctagaccctctacagaaagggctggccttgccgtcctgatatgtcctccagtgaggaatccctcataccatcagatcaggatagagcctttctcttttacattgcaaaactctgaaaatgttacatgatagttatttctatcagtctagaaaggcccaaacaagctgacccatccaacctccccagtaacccccattggtgagtccttatggcaactgtctgtcttggaatttgcagatggtagaacatgaatcaaaagctccatattttgatagccgtggctgagaatcagcacatctccagaattcagcatcacagctggccagagaagagaagcagtgagttccctatccttggagacaagcagaggcttcagaatcactgatggggatgttgaggggaacacttagggaactgatggggctggttgagatggctgtagcccccctaactctgtgcgtccctgctttctatgtcttattgatcagtgaaaccacaggcattgaagtggaaccaccaaatctactttaggagctggttttggtcttccctttccctctgtgaattctctgaatcactgtagtttgctgaaaaatttacaagtacagctggttctggtttaatccaggtcttcctgatacagcggtgtggtgctggagtgaccacagtcccgagccccaaggctggagggagcttaagtgagaatcttgttgctctgcctccaactgctctcaagcccagcgtcctacttgttggtcactgctcatgtacataggactgatctgcttgagagacactgggatttccagcataggaagcccaagaagggtcagaggctgccacgccctcccctcctctgttctttttctcaagtggtaaaactgttttggcacacgtgacacaccccttgggcacctacccaagagaagctctcaataatgaagagccatctcgattagtcttaatttagtacctgacccagctgccctcatctcctttgtacttaaatagctcctttcatccaacaagttcaaagctgtctaacaaaataaacccacttattcttgcaccatgacggcacaggcaagcattgtccttcccatttaagggagagagagagaaggtgagtcattcagtggttaagggattctgctggtgacataaagtgagtcagtggggccccagggtgattgacctgtgtttcttaagttcacatccagtgctctctcatttctaattaaaagattagctttgatgagacagtacatgtgtgtgtgtgcacgcacatctgtgtgtttgtcgtgtgtgaagagtttccctggaaaccacagaggtcatcattaccatcaccatcaccagaatcatcatcatcatcatcatcaaatcatatagcttcaccatcatcatcattgtcatagaaccatatatccatcaagctcttactatgagccaggcgctggtctaaattatagctacagtcatatgggtaaactcatttaatcattacaacaatcctagaaagccaatgctatggttttctcattttgcagacaagtagccaagactcagagaggctaagtaacatgcccaaggtcacacagctattaggtggtgaagccaggattcagatccaagcagcctgcctccagcaactgtgctcttaactactgtgctttacagaggccaagtctcagattttgtcaaaaggatgatagaatcataatgaccccattgttttgattcctttccttgaaggaaatgagtatgtttatgttagaagaaacgtttctgagaatttatgccacaaagggtggtacaaggaataaaagtcctttagtatctcacaggatcttgaagcttgaggactctggcaattttaataaactaggagttgacaaagaagctcaactcacttcctgccattttaaaaccaccttgtctattgagaaagaggaggagggaaacagaatccctatagatgttcattgtttcaccatttacaaaacacttgttaaagtactttgtgttgtatccaaatggaggccccaaacaaccttgagagaggggaacagacatcacaatccccatcgtgcagtgggagaagtacaggtgtagggaggtgaaatgccccctctgcacctcacagcaggtgaggggcagctccacgcactcaaccccaagtcttctcatttctttttccctgctctttccctgttcccaactgtgagggccttgctggaggtacatgtggataaaacttcacgttcagaccactctgaaatcctggatggattttacgggaaaggtatcctagggtctgggatctccctaggggtgaccttctcggtgctgtccccaatcagcattttagactcagcttctggcctttggccattgcctggaggctcccccgtttgatgctggttattgcatccaaacctccctttcccttccttcctccctggttcttggatatcctatacaacctgcctcagtcattcacattggtctccaaggccctctgccctcaggaggtttctctggtctcaagggggcacaactgtgtccactcaccagcaggactgcgtgctccctccgtttccctccaccagccttattcccctttctatttcctctgtcaatttgcttgatttactgtaggtgcttttctttttctgcccacaccacatccctggaatgatttcctatgctgcacctggcaaaagcctctttcatttgctttgaaacttaccttgatgcccatggatcctgtggggatgccacagggctgaagcgatgggccatcaccaccgcctctcctgtggtctccaaagcaacaagaaccagatgccaaaacaattcattaccctgcctggctgaagactagattattaaagggaacaagattctaatgagaacagttctctgaattctgcttatgagtcacttagagagcgaagcacaaaaaactctttgggatcaagtgcataacctgaaatggcttcatcccctcgccgtgtggctgaaaatcatgagctggattggaatgccctgaatggggtttgggtcaggggtgggtgtaggaagaaatggagtgggtaggggaaggagatatttttgggggaaggcccaatcacattacattatgctagctgtggacctgtctgctcagcaggactcagagttcctgggggcagggacatgacatacccccactccccaccatgtcccctgcccctgggactgtgccaagcacacagtagatgttcaacaagtgactaatgcccataatgtcacatgtacagttttctttttatttatttttaatttttagatggggtcttgctgtcgcccaggctggagtgccgaggtgtgatcatggctcactgtaacctcaaattcctgggctcaagcaatcatcctgcctcagcctccagagcatctggaactaaaatgtgctctaccaagcctggctcatttttaaattttattttatttttatttttttagatggagtttcgcttttgttgcccaggctggagtgcaatggcgtgatctccgctcaccgcaacctccgcctcccgggttcaagagattttcctgcctcagcctcccaagtgtctgggattacaggcatgtgccaccacgtccggctaattttgaaactcatttttaattttttttgtagacatggggtcttgctatattgcccaggctagtcttgaactcatgggctcaagtgattctcccacctcagcctcccaaagtgctgagattacagatgcaagccactgcacccagtacccgttttctatttacactgaatacaaacatatttctaaatgcccatcttacaccttctaaatatctcctttccttaacttctggctatttctcatacatattgaggacccatcttggccggaattgttcataaaaagacatttttttcaccagaactatgattcttctgtttagtcatatgctcagcatagagaagctgtctaatcaatgtgttctgaattaaattgaactggataatgaatgtgggtttgatagcccattgactgctcaatttctccttgaatgaaaaaaatttgcaaatattccaactaggaaaccaagagaatacatgaattctacccctcgcctgtgtgaggtcatggggatcttacaaccctggggtcccattttccccactaattcaaggagcaaattcactcaagcccattgagatcttgaaaacactgcaagaaagaggctagattcacaagagatggcagcattgtgtttactcaccagctagtctgtctgtggtccccatcttgaattcttgtgccatttcacattctgcagggcaaccagcaggtagaaaaaggaatatctaggagtaaccagaagataacaggggtttcttgttctctcctacatcttctgtgtggctgctgactggccatgacctgcagccagtgcaggactgactctccctgcttcatttctcctttcttctcttcccacttcttattccttcaggaacaggcagtgtcgctccttttagactttacactgcctgtgtgtagatggcagtatatttctcagccacaaacaatctcaagcttgatcacagaggtgatgcttcggtctggacagcttggaacaatgtcacttctttcagaggcctcagaagctgtagtcctgtgtccatagatcttttatgagtcaactccatttacgccttgcaggacactcagcacggtgggccactcctcagtctattggcttattttgtcttggcttcttctcagctttgcattttccaggttagcccctcggaagctgggctaactttgtctgatttgctgcatgatgctgaggattcctcccaacttttttccttgtctcttctttttcttgttgtctctcctggtctccgtctctttccatttctctgatctctctgcattgtacaaaaattctatgtttgctctcttgtcaatacaatccttgaatcttctcatacttagagcctaaacactcttctttgactacagtctccatgaggctatgccagccaatcagtagataggaatcaagagcttggagaatactgctggcatttagtttgggcttaggttaaagcctgcctgactggggaagaagaaagggctgaggaaatagctgcttgctggaaagccagtgcttggagcaggctgacaagagttaggaagcagaaggcctatgctgtcatctacaagctagtgctcatcaatcagatgcacgagcctttccattcatcccaagcccagatgaaatgagacagaagctccccacagacagctgccacctagccttgcgtccttcctctggagagtctcaggagtaacagtctgtagacccgcctatttctccccctttaattgtcttgtaaggaaacgaaagtattgattttattataagtctagatcttctttgtagtgctgtggggcttttcatctgaatggcattataataagcagtgataatggtcttggggagtgtagatgaaggaccttttatctgagactcaagcagagtgcaacatgaataccatcatgaaagctcaatgggagaagcactccaataaattgtcaataaaacggcagctctggctggcagccaaagccacagtggagatgggggtgctgcaacttttatatattcagaactttggctacctcttcctcagatcttctagtgccttccttcacctcccaaagcaaccccaaatgactccagcttgccttgcaaaacccccttgctcatgccgtgctcagcattttctttcctggtgcccaggtccttggatttaattacacaaccacagagacctcctttggtacctttagacctttggttcttaaagcaggtggcatctccactcgggctggagatgggaagcccaggacagaatatggtacatcttcctgatgtatccatttctcttagagaattaagcaaagtatttgaaagtttaactggaaatttaaaaggggctttttaaaaacattaaagctggctgggcgcggtggctcacgcctgtaatcccagcactttgggaggctgaggcgggtggatcacgaggtcaggagattgagaccatccttgctaacacggtgaaactccatctctactaaaaatacaaaaaattagccgggcgtggtggtgggcacctgtagtcctagctactcaggaggctgaggcaggagaatggcatgaatctgggaggcggagcttgcagtgagccgagatcgctccactgcactccagcctgggtgacagagcaagactccatctgaaaaaaaaaaaaaaatatatatatatatatatatataaagattaaagccaacatggatatattatggaatatagggtcaattcatatgaagtttaaagatcaactacaagtgatttcaggccgtggaggcccctttgggctatctcctgactttcctaacatatccatctactctgttcggatactatggataaccttaggaaatgtttgacaaagacctccttattcctttctctctgcccctgaatatctttcctagattatttaaatgcattttttttgttttgttttgtattttgagatggagtcttgctctgtcaccaggctggagtgcagtggcaccatctcggcttactgcaaccttcacctcccaggttcaagtgattctcctgcctcagcttcccgagtagctgggactacaggtgggtgccaccatgcccagctaatttttttgtatttttagtagagatgggtttcactatgttggccaggatggtctctatctctagacctcgtgatccgccggcctcggcctcccaaagtattgagattacaggcgtgagccattgtgcccagccttaaatgtgttttttatggctctctcggtttgcacttttcagcctctttcaaaacgatctcttaccccagaaacttcttgttctccaactagttatcaaagcctctacctttaaaattctctcctctacaattttcttaagtaatatgtggtggtgggggggaagtattacacggacccgtaaaacacaaatcgctgtctaatcttttcagtcgtgtcctccattgattctaatcatccaccttaaggcttccaaggcacagaatgctccatcatttgaagattcttctctaaatgcagagggaaagacagtccactgtggcctcttaatgcaacttcttcctcaaatcaatccgtgtttctccctagaaacggcaggtggaccaggacatgagtatgtttatgggcctgcagaattatgtgacacaaaagaatgtcatcggatggatcaacacctcaattaatgagggcagatacttgggctggactgtgtagcctctttgaaggcctaccacagaactctgatttcatgggtggactgtctgcggaggagtcctgacttagcaagaagcccaagtaaagaattttatgggagaagggactcttcagaggaaggcaaataacagactgaaggaaagggcgtttgaaaagaagtgaagaaataaaaagaaaaaagacattacatactgtgtccacaccctctgcagtgggatataaatgctccctagaggaaggagacccacagctctgtggcttggagaatttagactctgtcttcagccaggcactccctccctccctcccagcactatgccctacaacttctgcctgcccagcctgagctgccgcaccagctgctcctcccggccctgcgtgccccccagctgccacagctgcaccctgcccggggcctgcaacatccccgccaatgtgagcaactgcaactggttctgcgagggctccttcaatggtagcgagaaggagactatgcagttcctgaacgaccgcctggccagctacctggagaaagtgcgtcagctggagcgggacaacgcggagctggagaacctcatccgggagcggtctcagcagcaggagcccttgctgtgccccagttaccagtcctattttaagaccattgaggagctccagcagaaggtgagcggcattgctgtcatctccaagcaagagagtttgctgtgattctgtctgtgatagagaagtgtgtttcttgcttctgtgctgtcataattcttgcttcctcttttatttcaaaatggcttaagtcatttttaaaaagttgatgatttcatatttattttcagtcctcactaagccacctctcactccccagatcctgtgtaccaagtctgagaatgccaggcttgtggtgcagatcgacaacgccaagctggctgcggatgatttcagaaccaagtgagttgttcggaatttgcactagtgtcaattgcttctgtttaatctttaaagaaaagggatttccatctgaaaacagatctacccacttgttgtgaaggattctgcagaggactggggagaaccaagcaaagaaatgcaaaaatggatgaggactcacatcaatctgtttgttttgggatgaatattgggtattgatggagcctccagaaacctctgtctcctgggcctattcattacagaaagtggaaagataaggcacatgaggttatcaaaaatcattcctgtgagtcttgaagatctaccaggtagtactctgaccctgtccttgcgcaggtaccagaccgagctgtccctgcggcagctggtggagtcggacatcaacggtctgcgcaggatcctggatgagctgaccctgtgcaagtccgacctggaggcccaggtggagtccctgaaggaggagctgctctgcctcaagagcaaccatgagcaggtgagactagaaatgagaaatgcacaaacctgtctcagcctctggctcagggttgctttagtgatttggggcagcagaatgcagagtatgagtacaagactgagggtttcctttgaaaacatcacggtaagagaaaaattggagagagataagacctgttcatgttcccagacaggaaacatctttcactttaaactagcacattatttgagttgcccggagcagctccatgtgcttgcagttgatcaatagttgtagaatgagtcctagcattgcagtgttattgctttgtaaagtcttttttttttttttttggcaaaggccaagaaaaaaaatatcaaaccttataaatgtgagtctctactctttcaaagtattggtgaagagtgtttgtgagattcttcctctctcttgggaggggccatgacatgctcttacctcttacttgacagcaagagttttttgatatatggtctgaaattgcacagcctattttttttggcattctgaggtcctcacagccaattgtaaactgggaaagttgaatatcaattagttcatccttcagtggcatccaagcaaacttttgggatttttttctgaagccaagtgccatggcacagcagatggtggggagggggctatgccacatggagtgccttgagctgtcacaaactgctccactcaaagtttcttttccgagaaaatagactaacagggtttcaacaagcaatgccattccttagagttcattctttgctgagcatagtaactcttgtattttctgcatccataggaggtcaataccctgcgctgccagcttggagaccgcctcaatgtggaggtggatgctgctcccactgtggacctgaatcgggtgctgaacgagaccaggagtcagtatgaggccctggtggaaaccaaccgcagggaagtggagcaatggttcaccacgcaggtgggcatctaagcacgtggcccctcaggacccaaggccccccagggccccggaggcagggtctgatcctttctccccttgggtgtttcagaccgaggagctgaacaagcaggtggtatccagctcagagcagctgcagtcctaccaggcggagatcatcgagctgagacgcacagtcaacgccctggagatcgagctgcaggcccagcacaacctggtgtgtattgttcagacctgctggtgagcgacgggaacttgggaggcagagtcccggggatgtgcttggggccacacactctccttagctcttggagcttgtgacttccttgtaatcctgtgaagaaaccctttgaaggagcagctctctgacattcccaatcttctccaccacagcgagactctctggaaaacacgctgacagagagtgaggcccgctacagctcccagctgtcccaggtgcagagcctgatcaccaacgtggagtcccagctggcggagatccgcagtgacctggagcggcagaaccaggagtaccaggtgctgctggatgtgcgtgcccggctggagtgtgagatcaacacataccggagcctgctggagagcgaggactgcaagtgagtacatgggcagacgtgtttgatgaaatgatgcacgtgtgagtgtaacagttagacaccatgcaaatattgcataccttggaaaggaaattatgccttcacactagacatgctcaaacagaactcagacaacataatatggccatcatttaaaacataaatggtttggtagcaagagttgtttgatgtacaaactgaaattgcactgccaagtctttgcattctagtatgataatatgcatgactgcatgatatgtgatcaatgccttactttttacaatactgtattgcctagtgggtacattcccataggctacctgatttgatcttataattaccaccaggtgggctggatcagtattccctccattctacaggaaagtaaactggggcttggagaaggtaaatgactcaccccatgtcatcagtttggcatgaatggatttgagagtagacatcagagtttcagagtttctgtctaccttggtgctctatggcagggagaccattaacaatttgagttagttatctttgtagcaggggagtctgtgccttttctgttctaggccaggtcaagtcccttgacccaggcattcttacccttggggatatctctggcatatgattttaaaattgcccttaactcacttttccacatcattcttttgtctccagtctgcccagcaatccctgtgccacgaccaacgcgtgcagcaagcccatcggaccctgtctctccaatccctgtacctcttgtgtccctcctgccccctgcacaccctgtgccccacgcccccgctgtgggccctgcaattccttcgtgcgctagaacctagggaatgccagaggagcaaggatgcagggcccaggactccagagctgtgacctggctctggttcaacaaaaggggcctgaaaacatcatttgcatggctggagttgcccgcgtaaggcagccaagaaactcacccaaagcctgtagcctccccaactactccagactgtcctgctcaccctttccttcctgggggtctgttccttcctatgctcacccagagaactctctgatgtgccagtgggcctcccttttaacctcctaataaatatcatttccttggcaaagcagatgcctttttcatttgtattcatttgtttcaacgtgctcatcacctgagtacgctataaaaagccacttgaaagacaggccatataatggcctgactcttggataccagagcagtttcatgcctcaggggaagatggtgaatctggtgccctggacccaggagcgaggcaggcaggccagtgggaaggagggtggaggtgctgagtgctgcagtccctatctccccttagctattcttggatttcccttctaacttggacatctcccagagctgcttgtatcctattctgaatggaggaggcatgagctgcgggctggaaagaagctctggaaaactcatgttctttcagcaggagtttcaggttcagtgctgtattattctgggttattggtggtccaggcatttcccagcgaagaaaccctctgacctgccctgctatacccaggaattcctcctttcccttgtgtgggttgatcattatcagcctgggcttccagcttctgtcctccctcctcgactccaggtcttagagaccccgtcaactctttatttgatcctttggcctttctcaattcaatccaaccagtacctgttgaatacctactctgtgcagacgctgggtggtgggatgggtagagacacatgaagaaacacacagttcctgactgcaacttactgataatttgttaaaaaactagtccccaagtagtgctcttataaggcccagtcccctggcactgtgaacagctggtgggtgctagaaggaactctgagtaccgaaagggacaatgctggtacccaatggcattggtgtttatcaagaaagggcatctttctttgactctcatgaagacccatggaagtgtttaagcatagacctcccgaaaacatagagggccattttgatctgaagggatcagaggtctctgacttttcccaccacaccaggctttcccagcgggtatcagactccacctgggtgaaacatagtcctgtgtcctaaaatgatcaagtgaatcggaattttatatgtatatatatatatatataaatatatataaaaaatatatttttgtttgttttcataaagcgatgattctctccaccataatttctcccttgattcttctttttaaaactcaagttccaggatggatttggatttgtgctttgctgcttggcttgtgagaaacctctgacctggaactctgtctctactatgattcaccctgtgtctgtgatttcctccaaacccaaggtcaagctcagtccagaggctctctctcatgttgcttgtttctttattccacatcctgcttatgtatattattttacaataatacaaaagtactgctaatagctcctgtggtagacagaataattgtcccctccatccctcatcaaaatgttcatgttctaattcctggaacctgggaatatgttagattacataaaaaaggaaatcgaagttgcagatggaattaaagttgctaatcagctgactttacgatagggagattatctcggattatcaggtggactcagggttcttaaaagtggaagagggaggcagaagagtgagaaggtgatgaaactatggacccaggtcagagtgatgtgatgtgagaagaacctgccttgtccttgcaggatttgaagatggaggaagtgggtcatgagccaaagaatgcaggtcatctctagatcttggaaaaagcaaggattctcctctagaccctttaaagagaaacgtaaccttgccagacctctgattttatttttattgtggtaaaatatgtacaacataaaatttaccattttagccatttttaatgtacaattcaggggcattaagtacattcacattgttgaaccctatgcacagattcccactaatttttggcaagtctcttcaggaactgcctttagattcaattatgagtcacaatcctatggaggtggttttaaaaatgatccaaattgattgtctacgtcactcacaaggtttctctttgaacagcttcaaaaaagtcaaacctatcctcaaaggacaaaggtttgttatcagcaaactggatattaaaaagatacagacattaacaaaacagaactttctaaacgtgctttgactagagatggcatcctggaataaagaaaaattctggctggaggcaaaatttataggatctgtaaattctgccatgttttttaaaccataaaaatctcaatcgttgtagctatacctccccttaaacatttccatgtggctttcaaattatttccaggtgctctgtcatcatcatcagacacacggcaggacagtggttctcaaccttggctgtgtttgaaatcacccagggaacttaaacaattttttgaggcttgagtctgctctcagggagtctgatttgattgatctgggattcagcctggtcactgggagttttagaagctctacaggtgatgagcctccaatgagctaggttgagactcacttaccagaacctggattctagctctgacatttacgaccttaatagctctgtgtctttggataagacatgtggcttctcctagctttagttgccccaaaggtagagtggagataaccgtgtcttctctacttactttataaacttgccaaaggaagcatggaaaactgtttatggaaacactttgtagaccacatatttttattaggattattgacaatttttattattgccggtatagctaagtttcttaaggttaaaaaagtatcatcattttctttttctttttggatttaggttcaacagcaggatttgcatattgtcgtattgtctttcacaccataaattctttcttctttaaacccagctgtgcaccagaagtgtatggtctgctcggcatatttgatactttttggccccaggctcctcttgtgataggtgggcgggcagctcctttttcagttgtctgggctatttggcatgtctgatgctctttggtgacctgttttattgcctcctgagctgtcttggtctaaactcttagccggcagtatctaccactctccgacctttgacttttccctaggcttatctcctggatacttttgctgtttcttttcctttctgtttccctgcaaattttatgtttactttgggatggagctaaggcacttttttttccatccttacatctggagttaaagccatcatttgagttttttgaggcctgaggctgctgtcagcatctgcaggaagaacagcaggctgtccaggagcgctcagcattttcctctatataagcacatcccgttacttccaggagccaagccatgccatgataagcttgtgggatttgttactttttttttttggagatggagtcttgctctgtcaccaggttggagtgcagtggtgcgatctcagctcactgcaacctctgcctcccaggttcaagcaattctcttccctcagcctcctaggtagctggaactacaggcgcccaccaccacacccagctaattttttgtattttagtagagacggggtttcaccatgttggccaggatggtctccatctcttgacctcgtgatctgcctgcctcggcctcccaaagtgctgggattacaggcgtgagccactgcgcccagatgggatttgttactttttaaactcccagtttgctgaggagtaaagtgatgtgcaggaagcctaggtgtgtcttgtctggtgctcatagctggtattggaatccatgatctctcttctgcattttctcccagctgttatgttttgtcacagcctggcctaggtcagtgtctcatctctctaactcacaataaatatgatgggtcaggccgactgaagcctgcttacttgtgtcattttgaatgagttaaatttactcccaacatttcagattcttcatctctgctacatggtgacaaaaatggaacctgaacactcaggttctggggtgaggatgaaatactatatgcaaaggtacctagtagactatctgactagaaagtgattgattgatattcatttccttactaccttactgtctgggcactagttttctcctccataaattcaggtccttctagctttagagttctttgattgtaggaaactgaatttacttctgagatgaacttttacaggattaaaactcatggttagaagggtagtctttcttctaagttctaaatcacttaggtcatgtgattatgcattttaatttgcttagatattcagaaaagacaatctagtttccagtttggatcaattatgcaaaaggacgattatttccctgtggagaaaaataaatgagtaagacttggccttagttcaggaaggtaccatagagattagctgggtgctcaaaggcttgggcagagaggcctttggaggaatgatggagtatgaaggggtggggaacagggccctagaggggaccagaaggaaaaactacgaagtaaggggcaatgggaagcaatgaatatttccctcacaaaccagagaaacctctgtgccaaatataaaggttttgtactgtgtttaggtgttcatgatcaggagtcataaacctgaattgttcaaatccctgctccaccatttattgcctgtatctagggcaaatgtggagcctttcccagtttatttctttatctgtaacatgggaataataggccaactttatacagttgttgggagaatcaaatgagaaatgtgccaaagtgcttagtgccttgtttggcatctaataagccttgatgaaatggcagaatcatcatcaacaacaacactgccattattatcattattacaaatgcttgcacagagctataaggctagaagattccaagaggataacaaaagcacatttcaatcccagtaccagaaaagaggctttggtgatattacaatttcatgtggagaacttgtcctcctccagaactaccccaaataagataaccaaacccacaagatcaggaacttagcagagaagatagaggtaatggttatctgcaacttcctatttcaaccactaagttaatgttaacatttgcattttgatggttaatttatgaatagagttctgtgcccctagtacttacaaggtaagtgggtgaagtttgagcaccactgggttgggatgggcaatgggcaatttgtctgcttaacgaagtagaattttcacaaaattcttcatctgagccacctgggtcaacaataggaacaatgaagtttatggaaataaacatcatcactccctcccccaaacatgttcacacacaataccttaccttttgcaaaaaaaaacaaaaacaaaaacaaacaaacaaaaaaacaaaactatgaggtaggcagcattattattatttcaattcaagagatgagataaacaagactcaaaaaagggaatgaacttctctgagctcatatcataggtaaggatgtaaatccaggtcatttaatttcaaattcgtgttttttggagagtgacatcagcaagatgagggaataagcagccctggaccctcctcaccgtcatgggcacactaattcaataataatactcagataaattttatttgtgagaaatctagtaacaatttgagaggctcttgcaccctggatgagtgtaaaaccagccaaatcaaagttggtagaaagattttaagatactctatcacaataatccctgctttctcagcatagtatcatatggttaggaggaaatccccctcccagcttctttgcagggagaggaggaaataactggaccatacattcaacattcagatttttctgagagctgccaatgcactagcttctgtcttgcctgtcttagaatgcggatggaatccagcatactccagacgtctaggagccattgagaacaaagagggtaattttaactagcatatgaatattcaccacagccctctcccccggccaagttcagagcgagccagtgaaaaaccctgggtcccaggctctccctggagagagaaagagttagacctgtgtccaatattctgtcttttctgtggacagtatcagggatgggcttctgtctcacctgtgccagagtgctatggaaactagccatactcaagatgcctggaggctgcaaagatggtggtttggactagcacaaaaatttgagaggtccccagtatctctggctgggctgattggtgaaggtcttctccagtacaaggccagtccgtgaagattgggagaggtggctgttttgtctaatgcacagacaccagcacaaagatccaaggataatgaagaaacagggaaatatgtcctaaacaaaggtacaagataaatctcctgaagttgaccccaatgaaagagatatacaatttacccgaaagagaatttgaaataaccatatattcaaaatagagaattcaaaataaccatataatcacaggctgggcataatggctcatgcttgtaatcccagcactttgggaggccgaggtgggtagatcacttgaggtcaggagtttgagaccagcctggccaacagggcaaaaccccatctctactaaaaatataaaaattggctgggcacagtggtgcgcaactgtaatcccagctactcaggaggctgaggcatgagaaatgcttgaacccaggaggtggaggttgcagtgagccgaaatcatgccactgcactccatcctgggcaacacagcgagactctgtctcaacaaaacaaaacaaaaacaaaataaccataattaaagatgctctgcaaggccagaagaacaatacacaaagtgagaattttcaacaaaaaggcagaaaatacaaaaagtaccaaacagaaatcatgctgctgaaaaatacaataactgaattgaaaaattcaatagagggattcaatagcacactaaatcaagcaggagataggatcagtgaactcaaagtcaggccattggaaattatccagaggaacaaaaagaaaaaagaataaaaaagagtaaagaaagcttaagagatgtatgggacatcatcaggcagaccaacattcacattaggaagatccagaaggagaagagagagagaaagtttagaaaacttattaaaaaaaataatggctcaaaactcctgaaacctgagaaagaacattgacatccagatccaggaagcccagtgtatcccaaataagatgttcagataaatcaaagtgatacacattataattgaattgtcagaagtcaaagacaaatagggaattttgaaagcagcaagagaaaagtgacatcatgtacaagggaacctccataaggtaattaatacatttcttagcagaaactttgcaggccggaaggacatgggataatatatttaaagtgctgaaaacaaaccaaccaaccaacaaacaaactgccaaccaagaatatcattcccagtacaattatccttcaaaactgaaggagagatacagacttttatagataaacaaaagctgaggtagttcatcatcgctggacctgccttacaaaaaatgttaaaggaagttctttaagttggaacaaaaggatgttaaacagtaatataaatgcatgtgaaagtataaaacttgctggtaaatgtaaatatactgataaatatagactactgtaatactataatggtggtaggtaaatcactcttttaattctactataaaatttatttatttatttatttatttatttatttatttatttatttatttatttttgagacagagtttcactcttgtcacccaggctggtatgcagtggtgtgatcttggctcactgcaacctccgcctcccgggttcaagcgattctcctgtctcagcctcctgagtagctgggattataggtgcctgccaccacgcccagctaatatttatatttttagtacagacagagtttctccatgttggccaggatgttctcgaactcctgacctcaggtgatctgccctcctcagcctccaaaagtgctgggattataggtgtgagccaccacacttggccctctactataaaatttaaaagataaaagtattaaaaataactataactataaaaataggttaatgcatatgcaatataacaagatgtaaataatgacatcaatacataaaagatgtgtgtgggagaagcaaaagagtagtttttgtatgcagtgaaagttatcagctgaaaacagacagttataagttgtttcatataagccctatgatgatcacaaaaaaatacctatagaagatacacaaaagaaaaagaaaaaagaataaaaacatatcgatacaaaaatccatgcaacacaaaggaagacagcaagataggaaaagagagacaaaagaactctgagaaagacaaaagaattaacaaaatggcaatattagtctttccctatcaataatttattgaaatgtaaatgaattaaactctccaatcaaaagacatggagtagctgaatggattttcaaaaaaccaacaagtactatctacatactatctagaagagactgactttagatttaaagacaatgtataggctgaaagtgaaggaatgggaaaaaaaatattccgtacaaatggtaaccaaaagacagcaggatggctgtacttatatatcagacaaaatagtctttaagtcaaaaattgtcacaaaaggcaaagaagaacattatataataatgaaaaaattcaccaggaagatataacaattgcacacatatatgaacccaacatcagagcacctaatatatatataacaaacattgacagaaccaaagggagaaatggacaatgcaataatagaagaattcagtaactcacttttgataatgaatagaacattcagatagaaaatcaacaaggaaacaacagatttgagcaatactatagaacaaatggacctaacaaataacacgttctatccaatggtagcagaatgcatattctccagtgcatgcggaacattgtccaggatagatcatatgttgggtcacaaaacaagtcttaacgaatttaagaggattgaaatcatactaagtatcttttcctaccacaatggaatgaaactagaaaactagaacggaaataagaaaaaaactgaaaaatacacaaatatgtagaaattaaaaaacatttaaataatcaatgggtcaaagaagaaatcaaaaaggaaattagaaaatatcttgagacaaatgaaaatgagaacacaacgtatcaaaatttatgggatgcagcaaaagcagtactaagaggaaagttttatatatgtatatacataaacctatatctaaacatacacacacgcctaccatgtacctacaaaaattaaaaaattaaaaaagataaagaacaaactaagctcaaagttagcagcaggaaggatataataacactttttgctctaaattttattatgatacttacgataaaacttagagcagaaataaataaaaatagagactagaaaaacaatagcaaaaaatcaatgaaacagagtttttttgaaagacacagaaaatttacaaacctctagatagactaagaaaaaaagaggaaacactcaaataaataaaatcgaagatgtgcttttctgctcctctcatgctgcttttgaaattcagatgcagccttctttaaatgatttgtattgtgttccacaaataatcttttgggacttctttctgaaacatgactttgtttccctgcggaacaaaggcaaggtagagtgacagggaaaagaagtgaggtagggaaggctattctgtgaagagtgattattgggcaatagagaggctccctaggttatgcaagagtcaaagggtaactggatcccagaggtgatagaagcacacttatcagagacagtgtctacttgtagggacaacagagtaaatctgcattctcatgggcactgtggcttgtcctggaagcatctcaggctggcatagtcatacctctaggagagttaatactctagaaagaggaacaagtctagaaataagatgatagaaatttccagagaatttgagaaaaagccaccatggatacaaagatacctctgagcacccttgctccaattttcgtttcttggtgagtctgcagtattatgcttcatattcatgcttcagtgctgccatctgaactctcactgctccagactgtttccagcatattttttcttctagatatttctactcttgctcatctttagagaggctgttgctttagtacaagttggcaaattttttaattttagggctttgtggacactatagtctctgtcacaactacacaactctgccactgtagcacaaaagcagccatatacaatagctaaacaaatgggcatggctgtgttccattaaaactttatttactgccggacgcattggctcacgcctgtaatcccagcactttgggaggccgaggcgggcggatcacgagttcaggagttcaagagcagcctggccaacatggtgaaaccccatttctgctaaaaacacaaaaattagccgggtgtggtggcgggcacctgtaatcccagctactcggggggctgaggcagataattgcttgaacccgggaggtggaggttgcagtgagccgagatcgtgccactgcactccagcctgggcgacagagtgagactctgtctcaaaaaaaaaaaaacagaaaacaaacaaacaaaaactttatttacaaaaattcagcagggtaaacttgacgtgtgggctgccatttgcagatgccctcttttaggtatactcccatccattccattggtttccattttactttctcatttctcaaccatgaacatgccattgttttcagttgctccatgtgttggcaagttccctaaaccccaacgaatagtaaggctcaggatcatttcggcgaatacaggttgagtttctgctataaaaacaaattgaatgctgaaacatggatgaatgtgggaggaaagagctacttggaagagtaactctcaaagctctctctcagagctctctctctggggagaaagaacagtggcggaaactcctgggtgaggaatccctgattcccaaacaactccaccccatgtccctggctgtcctcccctctgagtaatgcagacagccttttggggctgtgatgattctatctcctatgaagccatctgatgaaactctgatttcaccaaccactagcacccaggaagagcctggtgtgacataagctgaatggaataattttatgggttgaggggggactctttagaagcatctaactagcatattttggagaaaaattagctgaagcattaggaaaggaaactatgctgtatgccaagcccccacccacaattaatggtataaaaggactgcagaggaaggagagactcaaacctgcccacatccacctccagcagcttacctgcttttccattacctgttccagcaccatgtcttacagttgttgcctgcccagcctgggctgccgcaccagctgctcctcccggccctgcgtgccccccagctgccacggctacaccctgcctggggcctgcaacatccccgccaatgtgagcaactgcaactggttctgtgagggctccttcaatggcagcgagaaggagactatgcagttcctgaacgaccgcctggccagctacctggagaaggtgcgtcagctggagcgggacaacgcggagctggagaaactcatccaggagcggtcccagcagcaggagcccttgctgtgccccagctaccagtcctacttcaagaccattgaggagctccagcagaaggtgagggggttggccatatggggggccagcagcagctggctctctttgaacagtaagacattttcaagttcaagtgtacctcatgagagaaatttcttttcagattctgtgtgccaaggctgagaatgccaggctggtggtgaacattgacaatgccaagctggcctctgacgacttcagaagcaagtatgttgaacttcaaggtccctatggttctttcatggccctagggacctactattgcctggaagagaggagaaagccatttctctctatttctcctcctagggctggttatgtaaaattagtttcaaatagggaactagactcatgtgctgcctgctctttggtctatactggttttttttggaagtgtttcttaaaccacaaaattcagagattgaaatgaattgttctttgggaattgatttggtggtatattagctaacaaaaccgagaacacagtgagagacttcatctcatgtgtgcctgtgggctcctcgtggtgttaggtgagtcagggaacctcttcagcctatccatggacagcttgactgaagcatatggaagagaagaggcagaaaactgtaagttcaagaagattcaggccaattctacccaaacaacacatgagaggggaaggtggttttctttcctgacttatcctcccactccgacacgtgcaggtaccagacggagcagtccctgaggctgttggtggagtcggacatcaacagcatacgcaggatcctggatgagctgaccctctgcaagtctgacctggagtcccaggtggagtccctgagggaggagctgatctgcttgaagaagaaccatgaggaggtatgaaacaaattcacaaaagcaggcctcagaactaagctactagcactgggaatcaggagaggattactgtctggatccctggtctgggacccttctctgaggaactcaagatgttctcagagagtgacggtgctacatccatatcaaggagtggagtgagctgctcattcttcagcggctgggtgagggttaggcaggtgttggaattactgaggagggacatcattcattgagccctgctctctgctgatcactgctaggtcctgaatttggtggtggagatggagggacaaaaaagaaataagacatggcccttttcttaaaagagctcacagtctagtatagaaagacagtcatataaacacagtgatataaacaagacagagtgaaacaagtaccatatgagatgtacaagcagtatgctctagaaataatccaggctgcccaagaggagatagggaactcttctcagatgcaaagaggaggattccagtacttgggtgtttcagtctgagggaagaggttgaacaaagacacagaagtggcagggcagggtgtatctgggtatggctgggcatgcagtacctccaagggatgaaagtgaagatgtgatgggaagcgaggaaggacttgcatatgccaaggagtttagacttagtcttgtagaaggtgtgaggttgtttccgtttctatgggacaacaattgacgtgatccctgttggagtttattgctataaaatgtgtgtgtcactctttgggaatgatcagaatcttccttttagtgcttttttttttttgacggagtcatgctctgtcaccaggctggagtgcagtggcgtgatctaggctcactgtaacatccgactccctggttcaagtgattcacttgcctcagcctcctgagtagctgggattacaggcacatgccaccacgcccagctaatttttgtattgttagtagagatggggtttcaccatgttggctaggatggtttcgatctcctgacttcgtgatccacctgcctctgcctcccaaagtgctgggattacaggcttgagccactgtgcccggccccttttagtgctttctgggcagcatcaagctcattttcccagagcaggaagatggcacatcttccatgggacagcaattgatgtgatccctgttggagtttattgctataaaatgtgtgtgtcactctttgggaatgatcagaatattccttttagtgctttttgggcagtattgtgctcatttccctggagcaggaaaatggcagatccattgccgtaggttcattgtttcccttttctccaacaggaggttaacaccctgcgctcccagcttggagaccgcctcaacgtggaggtggacactgcccccactgtggacctgaaccaggtcctgaacgagaccaggagtcagtatgaggctctggtggaaattaaccgcagggaagtggagcaatggttcgccacgcaggtgggcatctaagcacatggccactcaggacccgaggtgccccagggccctggagacagggtctgatcctttccccacttgggtgtttcagaccgaggagctgaacaagcaggtggtatccagctcagagcagctgcagtcctgccaggcggagatcatcgagctgagacgcacagtcaacgccctggagatcgagctgcaggcccagcacaacctggtgtgtattgttcagacctgctggtgagcgatgggaacttgggaggcagagtcccggggatgtgcttggggccacacactctccttagctcttggagcttgtgacttccttgtaatcctgtgaagaaaccctttgaaggagcagctctctgacattcctgatcttccccaccacagcgagactctctggaaaacacgctgacggagagcgaggcccactacagctcccagctgtcccaggtgcagagcctgatcaccaacgtggagtctcagctggcagagatccgctgtgacctggagcggcagaaccaggagtaccaggtgctgctggacgtgcgtgcccggctggagtgtgagatcaacacgtaccggagcctcctggagagtgaggactgcaagtgagtatggggcaaataatgtctgggaagaatgtgtacagtgggatattgtaggcacacaaatggtggccatgttttcaactagtcaggcaacacacattaactgtgtagcatgtgtccagtgatctgtgatagctaagcaaagggaggccaaaggtaagggaacagcccctatctcagggggctaacaatggaggagtggtggcaggagctggccagttgtaggaataacatttgtgtaaggcacattaagttccaggagacctcaagagtatgagataatatttttgaaaagcacaatttttccacctctgcacatggcattctgggagagagagaagggtttggtagtaatcagaacttgattctggctgggtgcaatggctcatgcctataatccactttgggaggttgaggtgggtggatcacttgaggtcaggagttcaagaccagcctggccaacatggtgaaaccccatcgctaccaaaaatacaaaaaattagccaggcatggtgacgcatgcctgtgatcctaactacttgggaggctgaggcaggagaatcgcttgaacctgggaggcatagtgagccttggctcccacttgcagtgagccaagatcgcaccactgcactccagcctaggcaacagagcaagaccctgtctcaaaaacaaaacaaaacaaaacaaaaagaacttgattccaactaactccagccactgagaattcataggttgtgtcattaagcccaaggtattgtgtgcattaaaacctcctcctaaagccattctaaacctccttgtcctcctaggctcccctgcaacccatgcgccaccaccaatgctagtggcaactcctgtggaccctgtggcacctctcaaaagggttgctgtaattgaaaagcttgtatcctctttgaagacatctacaaagccatttagatcaaccacaggaaggatcctcaagtcctgacttttctggagctcagctgacatcaagaaacctcatcttgcctctatgttatttctagaatgctgaaaagctttcctgacccaagcaaagacacacatcatcaacttccaatgtctggacaactccttcctgttgagggtcgagcctgtttgtttctaaagatgttcagctccctgtaatctgagctccagttactacttaaggtgtttcctgaacgtactactgcatttcctgttttccttttttctttggcattctctggaatgcaaggaggagacttcatttacttcccaataaacttcatttctctggcataataaatgtttctcattcatattcatgcattgtaaattactcatcatggctgtttcataaaaataccccttcattaggagaataaaatgaagtaaatgactgagccaagcctttatgcttcaccagaaacactgatgtagacagggaaggacgtccttctgggagactcccacccagggtaggccatgcaggaaacctggccttcaatacccatgcttaccttgccttgactacagggcccttggcaattttgcaaagcctccccagacttcactgctatctccagctctcaccctcatcagaatagaatgttctgcttccctttctcctaaactgcctgaagaaactacagaaactgcttctacagaaactgttcaaagagcagtgattctctcctctcaacctctctgctgctgctgccttgctgatatagatacctactcctcccttaaaatacaccttcattgatttccataaccctgcacactctgggtcttcttgtaatatctctaattacctgttctctgttgtcttgttagctgtcttcccctttttgtcccaaatgaaggaaacacctatattcttagccctctgtctttctctttctacgtccctgttcgtgtagatctagctcctctatgctgatgactgccacatctccctctcatctcagctcagtttccaggttttctgttgcgcatatgacagcttcacttggtatcaggtcattacatcatgtttaattggactaaaacgtatttttcccaaactggttcatcttgccgcccacttgttatgcctgacatgttgtcctccagatagaccctttaaatgcagtccttacctttcccctcttcaagtttattctttcccctagatctttggtcttatccataatgttcttccatagcctctttatcatttcattttctataattccaagaaaggccaatgttcattaaacatctcccccaaaacattaatcttaccccacaccccaccccacttgcctcatccctgaatttttaaagctttcaattttataggccagtctcaattatccattttatttaatcctatctgattgacacaactgcaatcaatcatctatagtgtgtgctgggtactgtgggcggtactgagaaacacaaataagtgaatcccagtctcggcccacagcatgttttacagtttagagtggatgagacaaagctacagtcatcatagacaaatatcagtgtggctcaagaaaggtgcagataaagaattacgaatttcagatgtgtgagagaatgaaaagaagaggctccaagaaggagggagcactcaatcaaagccttgaaaacccaaatgttctgttgatataaattttgtctgcctgtcttgttgactgcaggcccttcagcagaggcaatatcatcacctaattaaagacgatgtaaaccatggaatactgtaagtggaataaataaggaagagtaacactaatgaaaattcatgagaaggttattaaaactttatatacttcccatagtttcaacttcaatcaatgattactgtatgatattagcataattctgaaataaagtttgctgggaaatgtctggtcaggtgagtgtgtttaggccatagaagagggaaagttttggccaggtgcagtggctcacgcctgtaatcccagcactttgggaggctgaggcaggtggatcacgaggtcaggagattgagaccatcctggctaacacggtgaaaccccatctgtattgaaaatacaaaaaaaaaaaaaaaaaaaaattagccaggcatggtggcacacacctgtagtcccagctactcaggaggctgaggcaggggaatagcttgaacccaggaggcggaggttgcagtgagccaagatcgtgccactgcactccagcctggatgatagagtgagactctgtctcaaaaaaaaaaaagaagagggaaagttttcctgagcatgaactttgcctggaggagttatgaggtgtgtttagaaattgacaacccaatccctagcctagaacagagggtaagtgtggttataggagatgaaactgcaaggtagttaggtacggccatatttggaagtgctccgaatgattatacatgagattttcttgtaagggagtttgccatatgatatatctggcagctgtgtacaggttgggttgtgaggagtcctagaagctggatgaaatagaaggaagatcaattaagaggtgagagacaataaggactgagataagtggaggagagtgaggccaaagaggggtaggttttagaggcatggcttaaatatggaagctgagtagagatagaggaacaatggaaagaaaaggaaggaaactagtactgatcacacactgtattagggttatccagagaaacagaaacagtaggctatgtatagatacatagaaagagatttattataaggaattagcttatatgattatggaggctgagaagtttcataatctgctgtcttcaaggtggaggcccaggaaagccagtggtataattccaatccaaacccaaaggactgagaatcaggaaggctggtggtgtaagtcctggtttgagactgaaggctcaagaactgggagcattgatgttagagggcaggagaagatggatgtcccagctcaactctattcccattgggagtgcaggactgagtgtaagagaaacagtgatggctctggagagggtttgtggaactagatcccgagttccgttttgaggtgtccgtgtctgtctttgctcagcatagcttactactgacctggcctattctccagaccctctcctgcttctcccttaccggtcaatgagagaaataatttgcctttcttctactttttggttctatttgactacccacattggaggacacctgcccacattggtgagggtgatctttactcactctcctgattcaaatgctgatctcttttagaaacacctttacacacatacccagaaataatgttttaccagctatctgggcatcccttggcccagtcaagttgatacattaaattaaccatcacaaacacctactatgggtctgaagattttcagcctgagaaaatgaaacaacaatgagtttccattggagagacctggagaagaataactagatttgagggagatgtcggagagctgggtaaataaagatgataattagagctataggaattgttaagactgtccaatggaggctagcagggaatagaagaaccttgaggaccactgatagaaaccacagacttcagctggggctctccaaagtccctgatgtgaggttcagccttggttttgccagatcttgaggacagagatgacatctggttgcaagcagtttgagagggaagtggagaagcaccttaaaggacacagaagtcaaaagaagttggagctctaatgaaagagttgtcaacagcatccagggcaaggatggtgagaatcagacaaatctactggttaaagcaatggggagactcctggtgattataaagagaacagagtctgtgggaggctgagggaagaagctgtatttccatgtttttttcatgtctgtctcaaatcaccaacgtgatagtgagtgtaatgcaaaagttcaacacaacacatttgtactcagctgactttgctttatcttctgtgtactgtcaaaaggttttagcatctgccctctcccttgatctgcagagcaggacacatatataggttttcattccatctctgagtgggccctggatccagctttttcaggaagactagcaccattaaattacatcgtcctggattgtgtcatgctcttgtctattctagactgagttgatagtctagagtagtcaaaaacatagcatagatctcgtgggagctgaatgatgagaacacgtggacatatagaggggaacaacacacactggagccttctggagggtagagggtgggaggagggagaggatcaggaaaaataactaatgggtactaggcttaatacctgggtgatgaaataatctgtaaaacaaactcccatgacacaagtttatctatgtaacaaacctgcacttgtatccctcaacttaaaataaaagttaaaaaaaaacacatagcatagatgaactttgtatttttctgacttggcttggtccctgaagactccaagactccattcccattgggagtccaagactgagtgtaagagaaacatggtggctctggagaggatttgtagaactacctcctgagttccattttgaggtgtttgtatctgtttttgctcagcgtagcttactgctgacctggctcattcttcagcccctctcctgcttgtcccttatcagaagccccattgaacagggccaaacttgttggcttatttcctgaattaccccttcaatttctcctctcaatgtcctgaggctggaggattgataaattgacaacagttgcctttatggaacagtttgtggaagccctatcttctgctcttctaggaagctctaacaggctggcccaaaaccatgggctggggttgttattggacagtctttctgcttttctaattcccctctgggatccctctttggcaaaaagtccatcttcttgctctgtgtgcatgtagtgatactgctcctggcctctccttctcatttgtacatattaaaatataattaattttcaagtagcccaatgtaacttcgtatttctaaaagaataaattttacatttctcacggtgacaatttcaagcaccagagcctggacattggagaagatggctttgggaagaaggagggaggcctcctaatgcctttgaagtcccacaatgaggaaggtggcctcagcagaagccccatcctatgtccactccgtggttaagcatcgctggtgggttggcatgtgatctcttctatggaaatagcccgggcttccataataaatagcatccttaaacctcaactgcaatttgctcacatcttaagaccagaagcctcaaccatagcatctgccgctattacatgggcatgtataaaacctttcggtttgttaggatttgacttacttgtcatgtttaatgaagggccattgaacagagacaatagcatcacccatgtaaagataagaattcacagtacacagcaagtggagtaagtaaaaagcaattgccttccagactttgtgagaagctaattgaaacttggctcttttctccatagacccaagttcttccaactattagtacataatggccaagtagctgtgcagaaattatagttacttctactcaagatgtgggaatagttgtgttttctaaactctgacctccacttttaaagacacaaggatacttatctctggattattccactgtgactgaggtagaagctacagcaatggttatagggatccctgtggacatatttaccagtctgtgacacactattccttcccttttctttaaaaagtgccattgtcagatttttccttttgaagcttgggacgtagaagaaggagagaagaacacaaggtaattagagaaaagctaatgaattcagctatttgctttatgttatttgatctcatccaataggactttaatggtttggtactgattttaaaccaatatgcccatgccacatctcactgatagtggaatcattttaaaggtagagattcaggccgggtgcagtggctcactcctgtaatcccagcactttgggaggctgaggcgggtggatcacctgaggtcaggagattgagaccagcctgcccaacatagtgaaaccctgtctctactaaaaatacaaaaattagccaggcacattacaggtggtgcacgcctctaatcccagctactagggagggtgagacaggagaatagcttgaacctgggaggcggaggttgcagtgagctgagattgcaccactgcactgtagcctgggcaatagagcaatagagtgagactctgtctccaaaaaaaaaaaaaaaaaaaaaaaattagagattcaggcaggaggggcagaaagttgtggattgtgattgtaggggaggatatcagtaccttcaatgcattcaccctggaagaccacatgtttgccccaaagctgctgtcctttataaaagcatatttgaagcttctccttggaaatgacttccagagtcacccaagaaaacacacattattattttgtagtcacaacctgtttctgacccattaaagatgctatgcagcttggttattcaccctatgcactaggtgtggtttcaaatgacttctggctggttccaaaaataaacacacccatagaagatgaagattggccttcaatgaggataaccaaaagaatgtgtcccaagctgtgaaggcaagtttgaaggaagggtgatctgaggaatggcaggtcacctgtaggaaaagaattcttgtatggcaagacttaatatgtagcttccaaaaggaacaacttggaggagtatctttcagaatttgagcactgatagattaaacataaaatcctcatatttcatagttccatctggaatgcatgagagtagagcatctgcttgccaaaatgtgccaatggtcataaaatgccacttcatgcacatgacatagtggtggattttcagggtcatatcctttggagagctaggcttgggtatttctccctcagatcaaccaagggtttcctttttttttttttttcaagcttctagtgggtatgaggcattttcacttagtaaacttccttccttcagcatagaagtgacttttggttctttaataagtaaaaaacaggcttgttattttttggcccattctaatttaggatattgtcagcactgattgagctcaatggagctcaatctgtattttttgcattattgcatctcagtactgaaaagattggaagagagagacatgtaatatgacagagtgtggacattggaattagagagatctgtatttgaaccctggctccatcatgtaggagctctgtgaccttgggagacctctcagaggcttagggtccttatctacaaacccttgcagcattttgagaggactgaaggagctggtgcatatgaggtgcctggcactgtgcctggtgcacagtggaggctcagcaagcaggacccatcaccaatgacagagtcacgctgtgcacaggcatggagcacagtgcttcatgcagagtaggtgctcccaaaatttaggtttcttaatgttctgtgaacactgaatactagtagaaacggaggtgggtggcttcctgcagccccataggaagagggtagagttgcctccatctgcctggatggaactgcaaatgggccttgaaccaatggccttgtaagtcctttctcatttcagcttccaggattccctatcacatagtctagtttctagacgggtttccttacatggcttttctcacagagtcttaattgaatatgaactggatgagacacaagcctttcctcatttaggagaaagaggcacatatgtgccccctactctggggacagggcccagctgtcactctagctcaatgtcccatggataagcactgctacaggcaaggttggtcactttgaagccaaaccatgaagctcttacttaaccaatcagcatgttttgtgaggagtcctgacttagcaagaagccagagtaaaacatttaatgaggtataggactcaggtgaagtggctaaataacaaatggaaaaatcagcaaaggaggtaaaaaggaggaatacttgacatggttgccacacccactgctaacagaatataaagccctggaaaggaccaaggcttatcccagggaaaaggaatcaggttttgaaactgacttccagagctccactgcctccctgcaccatgccctacaacttctgcctgcccagcctgagctgccgcaccagctgctcctcccggccctgtgtgccccccagctgccacggctacaccctgcccggggcctgcaacatccctgccaatgtgagcaactgcaactggttctgcgagggctccttcaatggcagcgagaaggagactatgcagttcctgaacgaccgcctggccagctacctggagaaggtgcgtcagctggagcgggacaacgcggagctggagaacctcatccgggagcggtctcagcagcaggagcccttgctgtgccccagctaccagtcctacttcaagaccattgaggagctccagcagaaggtgaggaggtgggcaccacactgccagcttaatgaactacttatctatatttgacatactaaactgtgaatggatctaagtctgttcacagtaatgctgagaatgataaagacatagattcactggcttaggtatgacatcaagtagtcttagaaaatctgttgtagagccacaaaggaaggatgcaggctggtgttagagtgaagcattagaccaaaatcagtcatagcaatcttatatggcgtcttactccaaaccagaatatctgattttttggtttgattatgataccctggttttgttttcagagcattaccgcattttcaaaaagtatgcacctgaattattttctatgctaagaatttcctaagtaaatcttcaaatatttaaagcctttcaaagctgtagcaaaatatagcatttatggcaacacaagagagctgttgactccagcaatatctacagacacatggaccatcctctagagcagccatgtgtacagatgacaatatggggccatctgttctggaagagaagtagatataagtaaagagtccacagagaattgggactgaatacctggtgtaggtttgggagggatcccagaagaggcaatgtctgagtggggtttgaaggatgagtgggagtttatatccaattgtacaagcccttgattctgggagggaattgactgcccactgttctgtagatctggaaaattagatgccagaaaggggttgtgctatttgaatatcattcatttatttacccagagttggagagtgttaggcacagtgctggggtgggggataatgtactgagtaagacagtctccttccttcaggagctcacagtctaacaggggagatagatgtggaaacaaaatgatcacacaaaggtcataagaagtgttattgattaagtatgtgggttacacaaggggtcttgctagtgggtgagggcattctgggtacagcaagaagctttttgcaaaggcatgaacaagggcaatatgaggggagagtggagagaagttagcaggtggaatgtgttggataaccaagttgttctggcttgcctgggatttttcccattttagcatcccagaaacccctcagtcctaagttaactgggatggttggtcacccaaccgaagggttggatacccagtaacctaattattgcaggaagccagaagcagataagaatagaattcatgatgaattcacattggttgtcctggttttgaaatgatcagttttatgatcaaatcctccttttatctcagagctgaaaatctgaaaggactcaaagctatttgggaggaatgtggctgaaagaaaatagcatttcactttaaggcacaaggcatttcttagtataacccatttcatgattaatcctatccccagatcctgtgcagcaagtctgagaatgccaggctggtggtgcagatcgacaatgccaagctggctgcagatgacttcagaaccaagtaagattttcctaaccatcagagcagtctagtaacggacaggctgaattacaaagtgatgagctccctatcctggaatgtggaagcagaaatttctattgggaggattcttgcattgggttaggattaggttaaatgtcaaagcctcttcaataggtgctcagattctgtgttttaagtttttttttttaatttttttattttgagatggagtctccctctctcatccaggctggagtgcagtgatgcaatcttggctcactgcaacctccgcctcccggattcaagtgattttcctgcctcagccttcctcgtagctgggattacaggcatgcgccagcaggcccagctaatttttatatttttagtggagaccgggttttaccatgttggtcaggctggtcttgaactcctgacctcaagtgatccacccgcctcagcctcccaaactgctgggattacaggcgtgagccactgtgcgcagccctgtgctttaagtttgattgtaagacaccatccattcttactccttttcaacccaacgtctggagtaagtttgaaagtgattttcacattggtctctttgtatacgttagtcactgtcaaccccccaaaaagaagttattaaaccacaaaaacaggaggcaaaatccattgcctttcagagaatcaatcaatacttttaggtatgaccattattacaatcatgagaatcctttgcattttcctgggatcttacattttacaacataattttacatatatcatcttcagtccaaccctataaggtgttagttttgtcttcattttacagttaaggaaatcaagcctcagagagataaaggtatctatctacagtcatttaatgagaatactggctctaactctgaattcagtgtttcttccacaacactagattgcttcttggcaaggctggaaaggatgacaggacaacctggagcaggcttatgaagggcactgattcacttgagatggcaaaagcagcagggcttagttgatagtaacttgtaaacgagagtcttagaacaaacttagtttgtgttagactaaactatccacaggcattccaccaataccttttctgtgtgtctcagtgacaaaataggccttctcactcagtacaggagtattttctcccttaattttttaaattcaaaatatttcaaaatataataaaattgactaagtcagccaagtaaaggccgggaaacaaagactttttttttttggacctcttttgacctctggctgtgtgtgcaggtaccagacggagcagtccctgcggcagctggtggagtccgacatcaacagcctgcgcaggattctggatgagctgaccctgtgcaggtctgacctggaggcccagatggagtccctgaaggaggagctgctgtccctcaagcagaaccatgagcaggtaagagtcccagcccccaatatcccaatactgagagctctgtgatccccctgaataggataaggtaggatttgatttgctaagcaccctaggcctaacaacattttgctggttgctcaaaacatactttggggcttgttggggaatgagtgacagcttaccttttttacataaaggagtgtggtaagctgacctacttccccttgggaccagacatgtatggctgaaaggtcacacaaatatctttaaactactgtctactgtttgatgctatctattagcttctgaagaggtgccaggtaggttaatgaccaagactggaaggagatagaaaacattcttacactctgtttcacctagataactagaactcaagctagataaatggatagatggatgaatggatggatggatgaactgatggatgggaaaaacgggagaaatgaaataactcaaataatggttgattcagatctcatggctgaatgcaatactacgaaatcagatgcatgtctcaaacattagacgttttcatgatgaaaacatgtgtcatactctagtagtatcccatgaaataaataggaggaatgaaacctggtttctctatatttaagtagcaacaattgtaagccaattatcatgccaggcttatcactgagcaaaggggaaataagaaagaaatgatagaatcttggactgggtagaaatattagcaatcatttaatgaagcagccgtatcatacagatgagggaagggattcagagaagaggccagaatttccagaggtgacagctgggcttcaactcatgtttcctaagctgcaatgcaatcctcttcccattatattgaactgcctcaaagaagttattgaaagacttctttctgtgggtttatttcttcccttttctccattaggaagtcaacaccttgcgctgccagcttggagaccgcctcaacgtggaggtggacgctgctcccgctgtggacctgaaccaggtcctgaacgagaccaggaatcagtatgaggccctggtggaaaccaaccgcagggaagtggagcaatggttcgccacgcaggtgggcatctaagcacgtggccactcaggacccgaggccccccagggccccggaggcagggtctgatcctttctccccttgggtgtttcagaccgaggagctgaacaagcaggtggtatccagctcggagcagctgcagtcctaccaggcggagatcatcgagctgagacgcacagtcaatgccctggagatcgagctgcaggcccagcacaacctggtgtgtattgttcagacctgctggtgagcgatgggaacttgggaggcagagtcttggggatgcccttggggccacacactcttcttagctcttggagcttgtgagttttttcgaaccccatggaggaaccctataaggagcagctctctgacattcctgatctttcccaccacagcgatactctctggaaaacacgctgacagagagcgaggcccgctacagctcccagctgtcccaggtgcagagcctgatcaccaacgtggagtcccagctggcggagatccgcagtgacctggagcggcagaaccaggagtatcaggtgctgctggacgtgcgggcgcggctggagtgtgagatcaacacataccggagcctgctggagagcgaggactgcaagtgagtacctggcggacggcacccctgcaagggacaggcactgttctactgtaggataaaacagagactttgaaaatcaagtttcagatgccaatctgtctgtagaggcgagagttttatattacagccgtgggaagtgtaggatatttgttgctaacattatctgggctaaagatactttcttttacaaaagatagtcatgggacttgactccttcctccagtagagattttttggatgttgatggccaaataaatctttctgtcttcaggactgtcttgtcaccacaaaaaggaaaatgaaactgtaacaatgatcactttttctgatttaaacagaactttcaaatccaccgtttcattaattcttgttagaatcatctgaggcaggcagagtgggaatcattatcaccttcttatagatgagcatttgagtgtcaatagggttgatgatcaataactaacagtacagcagttgccagcgaacataatatttttatgaacacagtcttgtggaattttcataatcctgtgtggttggtactaccagtcctaccttacaggtgggaaagctgaggcttagaaggaggaagtgactttcttgtgtgtctagggtcatacaaggaaggctgggattccaccttacatgttctttgctcatttctgccactgtatcagaactctgtagaaggagtgatccaaacaaggcatggcttcctaggacatcagagaacgggttctgcttgtttctgtgtctctttggattgagtctcccttgtttgaatcacccttctcatgctgacagtctaatgcttctgcatcccaggctgccctccaacccctgcgccaccaccaatgcatgtgaaaagcccattggatcctgtgtcaccaatccttgtggtcctcgttcccgctgtgggccttgcaacacctttgggtactagataccctggggccagcagaagtatagcatgaagacagaactaccatcggtgggccagttctgcctctctgacaaccatcagccaccggaccccaccccgaggcatcaccacaaatcatggtctggaaggagaacaaatgcccagcgtttgggtctgactctgagcctagggctacttgatcctcctcaccccaggtccctctcctgtagtcagtctgagttctgatggtcagaggttggagctgtgacagtggcatacgaggtgttttgttctctctgctgcttctacctttattgcagttccccaaatcgcctaataaactttcctcttgcaaagcagacatgattctcatttgtattcattcttttcaaagtgttgactctctgtgtgcttcttataaagccacttgaaagcagaaggaggactttataggttaatcatctcctaaaaggtcttcatcaccttcattaacattcattaagcacagtgagtcccagcatccacttaggccagcataaaacaagtaggatcactaggacaagaggcctcgtctgaatatgataaacatatttctcatgggaccttactcagtaaaatgcaacggtgagcatctctagacagttccactcattcttttaagtccctagcagggatgacagaagttaatatttattgaacacctaccaaatgccaggaattgtgctactaattttttctcttcctcacagtgaggaagaatcaatggcaggactgaacccagagttcactctctgcttgtcagttacacatgaggtgtgattatgagaggacaaaattgatttcaaacaagcacccagagcttatacatcctcctggggagacacaatgctgttagtgctcaaaacatctctgaaactctcctttgtgaaatactgaataactcaatactaaaaagcaccaccttgccatcttccatatttgagcaatacccaacctattttgaaagtgtttcttttctcacttgaattgtttaaccatgggaactacatatgaatttcgggaccctccccctcaaagttatttagaatcaaattaggatattacaagtcaggtgtttgcaaatgctaacagtgaccacggtactggtgcctggcccctactggtgcctgctgatgtctaaccaaggttaatggctcccatcactgtgcatgctgtggtttgtgccaaggccactccctcagtctgcagattattcccagattaaccaatctgctaattatgtcttctctccttgagatgaagctgatactatctcccctgctgtgatgatgccggttccatcatcacatgtcagtcttaaattcttaaattttttttttttttttttttggagacagagtctcactctgtcaccccagctggagtgcagcggcatgatcacggctcactgcagccttgaacttcccaggctcaggctatcctcccactttagcctcttgagtacatgggactacaggcatgcaccaccatgcatggccaatttttgtattatttgtagagaggggtttcgctgggttatccatgctggtcttgaactcctgggctgaagtgatctgcctacttcagcctcccaaattgctgggattacaagtgtgagccactgcacctggccagtcttaaattcttgtgctctcatattctagttcacttaatatctactcctttgttgttgatgctgctgcagcttagacaggagaccttggaagaccgtctgagtgatactccatcctctgctcagaatgtcttagacccagtttgtggactctattctctctttcctcagggagagttcattccctggagctacctgcatgcctcatgaaaaccgcccttgttcaatttatcccggcagttctccacacatgctgggattactgtccactgatagttacctctcagctaccttcaccaggaacagtgcctcccaaatacccagttgcatgctttgtgagtgagaggtcaaagttctcaacacagtaaatacactttgtttttagtgttcaatttataaaatattaagcaaaacttgtttctatgtttgatgttgtgtcagcggaaaacatgggtctagggaaaacagtccttagttcttatctctgccatggtgctctccttggaggataaaagaaaggagtgtcagggagatcactttttctcaggacaaagccaaattgctcttctgaagtatctgggaagggtcagtgttaccactgagaaataaaactaaaatcctaagtcccccagctgactgaacggactctgtcttggccaaggggaccgaagagaaaccttaaaaacagagtcacatgtatgtttattgcagcaatgttcacaatagcaaaggcctggaatcaacccaaatgcccaataatgatagactggataaagaaaatgtggcacatatataccatggaatactatgcagccataaaaaaggttgtgttcatgtcctttgcagggacaaggatgaagctggaaaccatcattctcagcaaactaacacaggaacagaaaaccaaacaccgcatgttctcactcataagtgggagttgaacaatgagaacacgtggacacagggaggggatcatcacacactggggccttttggggggtggggggctaggggagggatagcattaggagaaatacctaatatagatgatgggctgatgggtggagcaaaccaccatggcacatgtacacctatgtaaaaaacctgcacgttctgcacatatattccagaacttaaagtataataagaaaaagaaaaaagaaggaaagaaagaaaaaaacagagtccctgaccatgacaggatgggaggtcagacatgcctcagtatgccccctccttattaacttttaaccagaattctttcctaaggagtaagcagaaaccagctctggaaaataagaaacagatgaatcattcctttatcacctttagcccatcatctgaagctgtgactggattccttcctcccgccttttgcagtttcaacacagcaaccaactggctggcattccttcctgataagagaccaccaaccatggagtggtctggccagtctacagaggatgtgcggtgagggttttcacatcctctgcctcacctttcaacatcagagggccaaaaactccatccttggatcatgctaatgccaccatttgtgaacatgcgacccatgaagaggcatgaagctcaattgcacatgcttacatttgtcttttcataaatattcatgactcctcctgtagcttattaaatagtgcatttggccacctcactcagcatacattcctttctcacatttccctccctcaaaatgcttactcttggcttctgccagaggctacgcttcccagcttgcaggatggtcagcctggaggctgcagccttttatgagaaataaagctctcctttccaactttattaatcttgtgatttttcagttggcactacttagcttactgacttggcaagatacgctggctgtaaaattcaccatgacatgatgacctgcaattggccatctagtgtgacaaggcaatgttgccaatgaaatgtgggtataatctagcttgtctcacttcataattttaaagtttctagtgaaattaaatatttaaaaaatctttttattggtcattcatgtgtcttctctataaatcaattcaatccaatgtataatcattgaatgcttacgatggtgcctgttgggcagagcactgaacaaaacaaagacctgctctaagaagcctactttcaagtggaagaagacagacaataaaaagaggcaaacaagcatgactgtgtcaagcaataagtgctgagaggaaatataaagcaaggaaagggaataggaagtggaaacttttggataaggtggtgagggcactctatgtctgatgaggagaaatagggtttaatctatttacatgtaattttattactgactttttggacttattttaaaaatcttactttgtcctttccattaaggatgatttttttttgttgcttattgtttcctcagttcctgacacctgtggattgatcttgttttctttgttcccccttttaatatgtgttcttaatttttaaatgtgcacacttgacttagcactatctaatttaatctctttcttcttgcataaaaacaagatccatagaagatgtttttgttttttgtttttaagagacaggatctaactctgttacccaggctggagtgcagtggtgtaatcatagccgatacagtttggatgttgtccttgcccaagtctcatgttgaattgtaattccaaatgttggaggtggggcctggtgggaggtgattgaatcatgggggcagtttctcatgaatggtttaataccatcccccttggtactgttgtcacaacggtgagtgagttctcacaagatctggttgtttaaaggtgtgtagaacctcccccactcccttgcttcttctcccaccatgtgagacacctcgctgcacctttgccttccaccatgattggaagctacctgaggcttccctagaagcagaagcctctatgcttcctatacagcctgcagaactgtgaggtaattaaacttcttttctttgtaaattacctagtctcaggtatttctttatagctgtgtgagaatggattaatacaatggcccactgcagccttaacctcccagatcctgaggatcctaacctcaagtgaccctcctgcctcagtctccgaagtagctgggaccacacatgcatgccaccatgtctggctaattttttactttttatttttgtagagacaaggtctctctatgttgcttaggctggtcttaaaatcctgggctcaagggattctctgtgttggcctcccaaagtgtagggattacaggtgtgagccactgtgccctgtcagaaatttttgtttatgttctttactttacttttttatcttggtttattttattatttatttatttattgacaggatcttgatctgttgcccaggctggagtgcagtggcatgatcatagctcactgcagcttcaccttccttgtctcaacctatctgcctgtcacagcctcctgagtaatgggactacaggcatatgccaccatgtgtagctaattaatttttttttttgtagagacgagggtctttctatgatgcccaggctggtcgtgaactcctgggctcaagcgattctttcaccttggcctctgaaagtgctaggattgtagatgtgagtcgccatgttcaatcttaccttatttttatgctccaaaatttggtcattattattattatttagaattatctacatggttaccagtttatttgtttgcagtgtttcttggactttattcgtcctttctggttttaactttttattttctgaaatacattctttggtagtttttatagcatttgctatggtttgaatgacacctccaaccattcactactacttaaaccattcactactacttaatggtcaagtagtgattaggccatgagaaccctgccttcatcaatggattaatgtcattttatcatgggaggggggtagttatcatgagagtggacttgttataaaatgagtttggcctccttttgctctctggctgtcatgctctcttgcatttacaccttctaccatgggacaatgcagcatgaaggcccccatcagataccagcatcttgatagtggccttcccagtctctagaactggagaaataaatttattttctttataaattatccagtgtgtggaattctgctgtagcaacacacagcagactaagaatctataagtgacaacttctctgttattttctgaaaatgtcttttcttagtggtcactcttacatgatggtttagtttgtataaaattctaggttggcagctattttccttcagcgtgttggaaatattataccattatcttctggattctgttgttgatgctgaaaagcctattgctaacctgtatttccattgttggtaattcttctatttttttctctctttgactctttctaagatcatctctttgtctttagtgttgtgcagtttcactatgttattctagggatggctttggtttagttttcctacttaggacttatgtgcttcttgattgattcatgtatttcaatacccgtggaaaattctcagccattacattttttcaatattacttatatcttatactccattttctccttctgaattcctttttttaaaaaatagcttcactgaagtataatgtatcatatataattcatatactataaaatttacagatctaaagtataaaatcaaatggtttttagtataatgagagttataactactactaccattttagaacattttattacctctaatagaaaccttgtacccattagtagtcactctctgttccctgcaaccctccaggcccaggaaatcattgctgtctctttagatttgcctgttctggacattttatataatgaagtcatagaatatgtgtttttttggctagcttcatttacatagtatgtttcaaggtccatccatgttgtaacatataacaggtatcatggaggaataagtgcatgatcctaacctaggatcatgaagatttacttctacatttttttcctaagttttctagttttagctgttacatttaggctgtgctccattttgagtcattttttttgtctgtggtgtaagaaaggggtcaaacattttattcttttgcatgtggatgtctagttgtcccagcattatttactgaaaagattatttttccccattaattatattgggacctatgttgaatattaatggaccataaatgtgagggtttatttctagactctcaattttattctgttggtctgtatgtctatctttatgccaatagaatactgtctgtgttactgtagctttgtagtaagttttgaaatcatgaaatgttaatccccctactttgttcttctttttcaagatcgttttggctattctggtcttatgcatttccacatgaataaaaggaacaacacgtcaagttctataaaacagctagctgggattttggtaggtgttgttgaaagtttagatcaacttgggtgatactgccatcttaactgtggagcccaatggaacatctctcctgtaacacagaggtgtgcaggaaagaaggactgcactcctcaagccaccctgcctgaatcctccctatgtagagggaactggggttagaaatgggtgagctatgaaaaatgggatctgctgatgtgtattggctgctgggaggattgggaactgccactcagctgcccagcacatggtgcttctggaaggcagagacatgagaaataatggagtccctcatttaaacatcatagcccccagtgttcttatcaagtttccattttttgtgtgtggttgttgagtaaatgcttctcatttgttgtaagccctttaatcaatgcctagagcctttgactgatgtctttgttaattttgagtggcttaatagatgtctttctaggggagagacttccccaagctcttcataccaccatttctgtgcttcttcaaacagattttggaccttcacattctagcttgtctgtcatctctttcatattttcaatctctaaatatttctgtgttatattctggtaaatttccttagagatcttttccagttgacttattctcttttcatctttgtctaatttaatgtttaacctatcaatcgagtttgaaaatttgttgtattttacttttgtagaaaagaaaggctcttttattattaatttttttagaattggctttaataaatgcaattctaacagagatgacaatactttatttggctttgtaagaaagggatatttcagctattaaagctaacaacaatttgatacataaaaagtgattgaataaagggaataataaggcagaaatgcatattttatatcttaacagaaatgaataaatgcaacattccatgtaaaaactaacaaaattacatcaattcccagacaaaatctattaggagtcaacttaattttataaaaatgaatttgtcatttaatgaaaaaagtaaaacaattaaatttattgactcctagaactctgttaaaatatttctgtgaagctctgtggaacaattattaataaaattaagctgacagaacaaatgcaacaattaaacaattgctgtgacttaataggagaagtataaaatatctaaaaatgtccaatagaattatgagagctaaaactttgtttttaattaaaatttcattagttcagtaggagatgagtgaaaatttagcaccctgaataatattattgatatcaaaagaaaattttgattttttgaagccacaaaagacctagtgatgaaattttacacttaaaatttgcactttaaattatactcttcacttttagaagttgtttgacattttttttttaaacatgcctatactttttgcatagtggctaccattttcttttagggatttgattccttattttgtcgtataagctctttaaacatagttatttaatatacttggctttaaccttctgtttcttgtatcttctcctccttgctaattgtgagttatttccttgggtgttttgttaatttatcagcatgaaggttcttgcattgattcaacccccaaaccttaatgataaataggtcactagtttaacaatctcaaaggagatttttactatttactttttttttttactattttactatttactattatttactattataattttaaaattagagcccactaagagatagatagttcagctttttaaagttttcctttaacaacaagcatcctttatttttctagttcacctttttactaagggtttagtgtttagagagacttgcatcgttcggtggtctccgcctgaactctctcataaagactaaaagccttatcctatttctttagtctaatttatcctctttcagtttagactctttcacaagctctctgcaagtttgggcaagtcacttccccttttgggtcaaagttatcccatttttaaaatgaaagagttgagtgaaatgaccagttaggtccttggtaactccagcatgctaagcctgtaggctttatctgacttagatagtatttccagaaaagaaatttaattatcccttatgtgtatgtgggaagtatagtctatggatgcgggtcaatatgaggtggttctagcagccaatcttggaccatgggctagcagtcaatggcagaatgtttctccaagggttactcctccttgtcttctccttcacccgaagctcagacctcatgccagtcaattcatgagctataggtagcttgatttcccttcattccttcttagtagctcacctttggaatggacaaagtcagcagatatcacaagggcatgaatgccgatcacaacaaagactttatttctagaacaggctcaagtgtaatgtagtaattatattggaacaggagcctcctaggctttttttttttaataactcattgttcctctagaagatttgcaagaatttccttctgaaattttaaatgtaaattttattttgtttattgtgcagaagtaacatatattttcaaagaatttggagagaagaaaaaaaacattcataatcctgtcatttaatagcatccagtgtcattgtggtgtgttttctttaatctctcaattgtccccattttaataatagtttaattttgttgtgactatcttttgtgtaccttactctggataagcatattgctgtcgagtagggtcaccattgtttgaccaattgttctaagttgctccaaacagatgggatataatctatatctgatgggatataattatgtttaaattactccaaattgttggtatataattgtatcatcaacttagaaataattgaaatcagagagttaacaagaaactgtactattgctgaattctatctttatttacacattgactcataattcttcttcaacacagcatatctatggttaacaagatgtttttctcactgcccttgatttctgtccttaggtaataacagatcagattgtttgtgaaattcttcaacatttcagtagaatggtgattgggctgataatgcagtgggaatcagaagatctgggtcctagctagatgatactaagcaaggcatttctccattctgagcctcagtttccccttcgtaaaacgaacggtttggatgagttgaccattaggatccccaatatcttgttccaagattttccctctctcttttaaccattttcatatttaggatctatgttaggaggtaagagggaggaagagaagagccaaatgcaaagccatctggtttttggtctgtagctgtagctgggaggcttggaagctgcttggattggtagctgtagctgggaggcttggaatctgttgtctgctttatcctctgctagcaaggacataggaagcccctcctctttctggccaatgtatgcctcctcaggcccatacttgaattttttcctcattgcctctttaggatatcaaataaggctcatcttacatcttgtgacaaaacagaagtggtgtcatatgcacggtcagttcagattactcatgcttcttggataattgttcctaaataataaactattacgaatcatcaagttcaaacaagtctggcatctgcgtaaagcccactccaattattgtataaaagtctgtattggtaagatcaaagctccaagcttaataatcagatatataaatttattgcagcagaacttctctaagtaatgaacatctcaattctgtgtgtttgaagtcttggtttaccgaagttcactgtgggcattactttaagaatgtgcacaggcgctgcgtacagcaggcatacctgtgtgaccctggaaaggtcctggtaaatttctggtcaaggcagccaataccctctccatggtcctgatcatgtgcggcccctttgctgcacttggcacttctaacatcacctcctcttggaagcaccctccttcctgcccttctgggatgccatgaacttgtttttatcatttttttctcaccatttctccatttatcacagattctttttccttctcctgatctctgattgggaaattctccaaagtttggtcctcagctccttgttgctcttctctttgtactctcccttggcccagttctctaactctctcacttgtactaaaccttatctgtatcatcatccctgccataaattctagtcttgcatggactgttgcaatagtctctttgctgaactctttgcctccaatctttccttcatttttcaaaaacagataaatatttgctaaaacatttcctaaaacaccttttgtcacaccacacttaggttcaaaagcttatactggctctacagcttctggggaagtccaagctgctccacttcaccatcgagaccccctaccatagggtccccatacaatcccccataaagctttaatttctagcacttcccttcacaactctccccttcctgctgcctagacttaccctggtccttcaaccatgccttgggctttcccaccccattcctgtgtgcacattattctcctcacctgcacttcctacttttctcccctctgcttcttagaagcctccctatcccagcacaaatccattcatccattcctaagagcctccaatcctggagctgctcgccctccccagtgtgtaaaccactcagttatcacttgtcaacttctgcctcagattattatttcctgttcatcccttcatcactctacccacacccattcaacagtgcctaccaggtgcctagagctggggattcaaagacaaactagaccctgcccttgccttcagggacctcaaatagagacagagagacaagcacataagtcatgacagtgtcatgctcaaggtaaaaagagagcttggagaggagaaagggacggcctgtctgaagaagggaaggaagtaagccatttatatttaagccaagtgttgtgatgaaaagaaaagtgatctgctttggaatcctaggtccacaacttattatcctcaccctctatgccttggtgttctcatctataaaatgggaattatacagtttacctttaagagttctggtgaggaataatggacatctaagttctgcatgtttgaggatcatgtttgtaaaaaggatctagtttgtgaaaagtgtccacactaccttgggcttgtgcagtttcttaacaagtaagaacttcttctgaccatagcattgagtcctattttccacccctcccagtgtctattacatcgccctggatgaaattgtcatagtggatatctattatttggttgattgacgtcatcatggacatgaaaaaagcccatcatatcaggaaacatggccatcaggaactgtcccagaaaggatctattcctctttctgagaaccatgaatttggaatttggcacttggaaatgtgacctagcaaaagacacagggcaagagctatgcttttccatttcaccaaggagagccagagcttgccaaagagttaggggcctcaagccacaaagcagaacagcaatactgtctcttgacctgctgcaccccactgaagaaggccagggctttcatgagtccaggtctttgaagtcacaccatgaagctcttacatcatgacacacagcatggaagaggagtcccgacttagcgagaagcccaagtaaagtattttatgaggggagagactcttctgaagaaacacaacaaatggagggaagggcttttgacaatcaccaaatgagcaaaaaaaaaaaaaaaaaaaaggggttgtcttacgtgtccacaccctccatggacgaggtataaatgctccctggaggaaggagacccaccgctctacaacctggagattttggactctgtcttcagctggacactccctccctgcaccatgtcttacagttgtggcctgcccagcctgagctgccgcaccagctgctcctcccggccctgtgtgccccccagctgccacggctgcaccctgcccggggcctgcaacatccccgccaatgtgagcaactgcaactggttctgtgagggctccttcaatggcagtgagaaggagaccatgcagttcctgaacgaccgcctggccagctacctggagaaggtgcgtcagctggagcgggacaacgcggagctggagaacctcatccgggagcggtcacagcagcaggagcccttggtgtgtgccagctaccagtcctacttcaagaccattgaggagctccagcagaaggtgaggagtgggcgacacagtgcctccagtaggaagttgtcgggagagaatccgagttgtgattgagaaacaacgtaagctcttgatgtgaatgaaaagctgaaaactggcctttccattttgttttttgagggcccatctaatactagacttgggactgttaggtctaaatatttgcatagtgttagtctatgtggaggtagcagcactttgcataaatgagctgtaattaaaaactacctctgaatgcttccatgcacctgccaagctccagaattattaccctgaggtgagagaaaaggactgagtccaaaggaagctggggaaacggaatcttttgtaaagactgggccattttctttctccctcatctgagctttttgccccttggactgctggctgcctctctcttctaggttcctacttatcctgatttcattgtcctcaccttcatgcctctgggcttctcctggtgcacagtgtccagtgagagcctaaaatgtttggcccaaattgggaagattggaaattacctaggacaaagtagtcccagttgtctgggacatctgggaacatgtggcttcttccctgatccagtcccctgcaattgctagtttacctatttgtcttttctgcttgattgaaagtttcttgagggcaggatcaagtgcttaccaatttttgtatcctcagctcctagtatcatgccagaaacatagtaggtgtttttcataaatgtcaactattatgatcagcttctcagtattgctcattaggatagaaaaaagattatctacttatactttttgcatattttggtgttctttttttgaatataattttggaaatattcattgagtacctgctgtatatagaaagcatttaataagatagacatcctgatccttccaaggaagtgaattaggaaggactgccattggtgaaaaattaccaagtccttgctcattcttgaatgttttgggccttctagatcctgtgcagcaagtctgagaatgccaggcttgtggtgcagatcgacaatgccaagctggcctcagatgacttcaggaccaagtgagtgggcaagcggggtgttgctgtttatttctcttctctggcagccctcctttcctttagcctgttgtcaacacaagttaaacaaacagtgactgagctatgttctagctgctttctccaagattcacagagccaccacacaccgtagctcagagatcctttccccaggccttagacttcctttcctccttcttctcctctgtgacgtgacacccctagtcgtactgtgagttagtgtagacgtgttggcccccgatgttctcctatgcacagaacccattcatgagaatggagaatgtggaagcatattattttggaagtcttacagtttgtcagcttttatcctaaatccactggctttcttcttttttttagagacagggccttgctctgtcacccaggctggagggcagtggtgcaatcatagctcagtgtaacttcagatcctcagactcctgggctcaagcaaccctctccccttagcctcctgaatagctaggaatatagaagtctatccactggatctttaaacgtaaaattaccagtgcattttcttccagctcgatgctgaaaacctaaacaaaagagatggctataaaaactacaaaccctaattcctagttgcctgactaaccaaaccaaagcagagtcaaggccaggcctattcctgcccagcctgttcctgaccctcctgtgatcacagatatgagaccgagctgtccctgcggcagctggtggagtcggacatcaatggcctgcgcaggatcctggatgagctgaccctgtgcaggtctgacctggaggcccaggtggagtccctgaaggaggagctgctgtgcctcaagcagaaccatgagcaggtgagttccctgaagagtgatgggctcagactagccaggacctgtttcacaactgccacagggtccaggacaggctgtcagtagaggctcaattagctgaggaagtaattctgcatacaaaaagggatatgtagagaatgactaatctaaaaacctgtgatatgagattaggatttttctgccagaggcaggaatgagagtgaggaagttggcaagcccagtagtgaggaaagctgggtaatgaggcagaagccacagcctctcctgtgcccaggttagagtgcatgcagcagcaatcttctattccaattctccatttgtagctggagaagccaggatggcctaggcccatcaggcagagagggctgagctagaacaaaatgcaattctcttcgttcctgtccagagctctttctgcttgctgttcagtgttgcttggaaacagccttgagcaaaatgctcaccattatggctaagtcagttgggcaaaaaagaagacgtgtattttatgcaacctgaaatccaagaacaatgtaaatggtgacagttaatattaatcaagtgcttagtatgtgccaaacattgtgctaagtgctttaactccggaggcagttctcatgttaagatgaagaaatcgaggcttcaagaagcttctagaagcaatgtattaagtggtagagatgaggttgaatacaaatttgtctgaaatccgcctaagcccaagtaccaagctatgcttagcagggaagtaaacagatacttattgccttcagcaaaatctatgctggtggaatcaacaaatcaccctttaagtctcttctatgccaggatggcagattttgaagtaagcattctgtatttcctctttagctagactctgttctttttattatccatgcttaagagtcaaacatgtgaggctatatggtatactagcaaaaacactgaactgggcatttggggaccagagtttaaataatggcccaccatgtatcagctttgagcccaaatcactgaatctctctaaatgaggagtgatacatttaatacaaagagcagagggaagtcatgggcttgaaagtagtttgtaaaaagtggagtatacaaattagtcattgaatatagatcctggttagtgacaggatcagagggaacaaagtttcttgaaagcttaagaatgatcagaagttgaattgcattctcttaaggagagcaccaagatcctttgtgaaatttaaaattttgccctttctccatcaggaggttaacaccctgcgctgccagcttggagaccgcctcaacgtggaggtggacgctgctcccactgtggacctgaaccaggtcctgaatgagaccaggagtcagtatgaggccctggtggaaaccaaccgcagggaagtggagcaatggttcgccacgcaggtgggcatctaagcacgtggccactcaggacccgaggccccccagggccccggaggcagggtctgatcctttctccccttgggtgtttcagaccgaggagctgaacaagcaggtggtatccagctcggagcagctgcagtcctaccaggcggagatcatcgagctgagacgcacggtcaatgccctggagatcgagctgcaggcccagcacaacctggtgtgtattgttcagacctgctggtgagcgatgggaacttgggaggcagagtcttggggatgcccttggggccacacactctccttagctcttggagcttgtgagttctttggaaccccatggaggaaccttataaggagcagctctctgacactctcaatcttccccaccacagcgagactctctggaaaacacgctgacagagagcgaggcccgctacagctcccagctgtcccaggtgcagagactgatcaccaacgtggagtcccagctggcggagatccgcagtgacctggagcggcagaaccaggagtatcaggtgctgctggacgtgcgggcgcggctggagtgtgagatcaacacgtaccggagcctgctggagagcgaggactgcaagtcagtatgggggtagtaatcttctccttggggcatgttaggttgctgtggagatgaatagtcttcttgatggaaatgaatttataatttcaagcttttgtttggaggaagtccaaggaggaacaatattcttacacaaagcccttttagtattttccaatctcttcagctcattttactctaacttgctccaatgattttctgcccacaggctcccctccaacccctgcgccacaaccaatgcatgtgacaagtccactgggccctgtatctctaatccctgtggcctacgtgctcggtgtgggccttgcaacacatttgggtactagaggccccacaaccaggaggagaagaaaggcatcagtcacacctcaactctacttcatcccaacatctccaacagtgaccacactttggaaagaggcagaaacctttctatcaaccctggcttccaggggtcagctctagccttccactgtattccctggcttgattcttcagcataaggctgcaaaatctgtcttctgagtcacatagagagacctacagcaggatcaagatcaagcaatatctatcaccataaagacacatttgcataacatgttatacttgaataaaacttaaataatacaatttagagaaaattccattaaatgtgatagagctgatgggcatgctatgaaacagaacataattggagcaaatcttccttgtcactcttggtctttggagatgcaatagaaatcctttgttaacctcctaataaactgttattcaaaagttataattgtctgtttcactcattaattccaaaattggctgtcttgtataaattaaaaaaataaccagagtttttccatcagatgaagaggttattcaccccatatatggcctatgatttccttcaatggaaaagcctccatgaaagactattaacccggatttagtgtttgggaagaaggtggtgggaaacagaatggcaaattcatatgaaggtgtctttagagacacaggaactatttattctgaaacattaagtggagggatccgaaaaccttttgagtaaaaaaaaaacctgtactgaggtaatataaatctatcaccttaacatatggtatataatctcatatacacatatacataaccacataccatataagcatatgtacaccacacacacatgcacacacacaaccatgctgtgctgaaatgtttaggtagaaagtaggaaggagcagcaaagggtagagggatatagtggccaggaggagtgtgggatctgctaggctggatggtggggaggtgcctttggttcaccttcctctctttgttcctgcctcggcactcaaggactccttgtgactttctgtagttctatgatgtgggcctggaactctatgctggagttctctgctcagttgcctggggtctgcgtcagatgatggagaactgtgagtgggttatttggcggaaaagtctcttttgtcctagtgagccttgagctttggccccacctgtttttatttatatgcagttgggaccatcattatgtcacattactgccttcagtggcatccagatttggcaatgtttaaaaaaacaaaaacagcaatcaagtaaggaaacccaaggcccagcccacaaatgagattgagtctcatttttcacttctctactcctacttttctaaatcaatgattgaaatgaagagatattgagaatgggaactcttaatagagattagaatatcatcaacctatgagaacaggtagggaggggcaggaggtagagtgggggttggaaattctctccaaaacttgcagaccatatatttaggtgtggtagagatgtccagggaaaaatacccaaaaccttccattcagggctgtggataccagaggacagctaaggagaccagccctcaacagttgctcgtggccaccttcttcccttaggtgcggaccagtcctctcttttgcgttagggctaacatagagagaatgctgagtctcaaagattggtcactcgctactccatttgtcttcagcagcacagtcctatagaatggagaacagatgttcctgaggatctgagagtctgggctcctttttagtggaagatcatgtatataaaacatttctttatttgagtttggaagagaagaatcagtagaaaaggtctttataaactttaaaaataacctggataggatacagatttcaattaaatcaatgtagaaagtcacctcatcattaatcatgaatgtctgctgcttgcttggaaggaggagataaataatgggttcagaatcctttctttctctcttgtatatttcagcaacaatgcagaggcaggaaaaaaaaagcaagaattcttaaaggcgaggttctgttattcaaccctgggctttcccaggtgcaaacttaatttctcctttctgcaggttcccaggtctgcagtcgctgaggtcatcagctcctcgagccaggccttctcagaaaacagtgctctgaggggagaggcccatagcaaggaagcaaggaaacaagaccctgggaaatgtctcctaatccctgccccacccttccctgtgaaataaaccatgatggcgctgggctatgagtcttacccactaggagatggtgtgggatgctgtgatgagaagaagaattatggcttgttttggaggcaacattttttggtcctggttttggatatattgttgactcccctgaccatcagagtcctccttttgagagacctggcctggcagcattgtggggttgtgaagatcccctgtgtatggaagtgctttataaatggtgcagcatggtacctatgtaagactcagtattcttgttgttgacactttgaccttgaatacgaattcctgggctcttgggatctaagtttgatattgtctagtcccagtaaaacattctactcagcctcctaacagcctgtttgctcctatttttgacagatgtgaaccgagctcctattgtctcagtttggagagcttgcctgagaggtgacatttgcattgagacctgaaaacagagaagaaacagagcagagggaaagagctttccagagagagggacagaaagtcaaggaagggagggagtaaggcagttgcctttgaagaagggagcaaggccagggcatcgggagtgatgagtaggggaggaacaatcagcctgtatgtgtgggcagtggccagggtacatgggggctcgccagttctgtggaggatccgatttcatttcaagggaagaggaaagccttgggagagttaaaaggatgaatttgattgacacttttattaaaaggagtgcattggcagctgaatggaaaataggtttactgaacactaacatttaaagtttcagggtagtggatgacaattacaagtcaggtatgtcttcttttatgtttcaaagaagaatcactgacatctaacaacaactgctcacatttctcatcaaaaacaggagagtctggcagcaggcaccaaaagtcccaagaatggctccaactataaaaggatatgaggatgacatgatctgtcccttgttattgcaaaatgcacactgacaacttgatgaagttatgtgccaggcaggtgggccccggccccaccaggctcctcgctgagcctgctgcaggtgtgcagaggtagctttccctcactctcactttttttttttaaacttgtagggacaagcacaggactgaaatgtaaagtgtagggggagcccttgaaactattgctatggaataaaagatgaaatgctcctgattattgtaaatacaaagttgcatgcaggattgtgtaaagacaatgccaggctggactaccagaataagccaacagcgtgtgatgtgcttccccctgcagagtctatgaacggaagggcaggcagggatgtttcacatcaccaagattcctatcccagaaaagcagatgttcatagctctgagaacggaatgcgacccttgaggagagcctataaacggacgcatgaggggtgcatgttcatatggataagatagggctataaatgccctcatcttgccacagctcttctaggcctctttagggttaaggcattctcccttctgagaatttctggtctaacctgttgtctagcttcacgtcctgtttctatggattgtttgtaaccagcttttgctgcaactgttactgctgattaatatcttgctaatcacaggttatggaaacactgtgtttctgttttaaggctctgttagaaattactgatgcacatactatattgtaaattcttatctctgtatattgtacttctgcatacagatgttatgttaaagaattgcttcatccccatgtgaccatctcacctcataatcaaatgacccgaaatccctcactaacctacccccaccctcactaaacttaataacaaatgctatatttatatccagtgcattggtggcatcgcaggaccagaaggcggtgaccccccggacccagctttcactatcttgtgtgtgtctattctttctcaacctgccaatcctcctgggaacaaagagccccattgcattgcagattgctggccagatcctgcaatagtaaagcctagggaggatttacagcctccccagtcaaagatgtatttacaaaaaattcaaacacttgctcagctgcggcctggatgtgatggcatctacacaagatgacttcctgcagcggcacaaatgaagctgtgggggatcccgacgagctaaagcttgggtgtggcacatgggagtgaatgtgtttaaagttttaaaagtggttaaaaggtgaaaaaagaaaggctagaaaccaaacctcagaaaaatcatgcatttgaaagtgactgctttagttttcaatctggtttcagtcttgtaacctctatctgtatctcagcctgcattgtgttactatgctttttaagccacggtttcttaaactgaaaatgggagactaataaccacctcacttttttttaaataaaggtagaatcagattatgttgcaaagatgctcaacccaaccagatacatcataagtgtccagtaaatggagttcctattcacttccttagcagccctgcattctgacccctttcctattgctcatcacagggtctccacagccttgagaataaaaggttttgctcatttgagtccttcagtaaccaggtgagaatctagtttcaggttctctcaaattgagggttgtagaagacaggccagatgggacaagaaactgaagaatctgagctcgagggctgagaatcagagagaaatgaattcagatgtgcctgcatgcatctgtgtgggtctgtgcacctatgcttgtgtgtgtgagtgcaggtgtgtgtgcgtgctgtgttaggaggaagatggctaattatgattatgaaactggtggtatttttgctgattataacaatcagaattttcaaatggaaagataaaagtaaagcacagagctggtggtgtcaaagtcataggaattttagtcactttatgggaactggtttccacttatgcctattttctacacaggaaaccaacaattaagtgtatcattaaaggcctgggtaaaatttaacgtgtttgtatttcctgttaataattatttcagacctgcacatgctgacttcatcttggttggttgtggaggctgactgactgctggctgctgtgaaacatgagggttaccaagaccctgagagcagagggtgtgtggtccattgtcaaagagccagggggacacgtgggagggtcactgcgggaagtgactgcaggccatgcatggtaatgcacaggtatgaccagcacagagggacatgcctctaagaagggtgcactctgggggcagggaaaggacatagatgagagagtttgaatgctttcttggtaagtgcttaattagattggttccccacggcagcattttatgaactgaagtgcatagacacttcaaggggctataagagggaaaatattccatgggttagagatggagagaggagcatctagaattttgcaactgagctttagtgagctctgtttcacatttggatgtcaaggattttagaaaagcagatgtctgcctcactgctgtctgtttaactgaaggtttacacttgtgctctgagattgttactaaaacagaaagaggaaggagaagaagaggaggacgagggggaaggagagagaatgagtgaggaaggaaggaagaaaggcagggaggaagaaaggaggagaagaagaaaaaaacaaaatgtctattgcagttgtcttaggcatttagtgaattgtcagtttttttgcttggtcgttttttgtggccctgtttctgtcactaccttgcctttgtctccatttctaaccccatgttcaccccttggatttaatggtagatccagcttttctggttctggccttgggtgcctccagggcattatttgcccctattctctctagcttttcctaattctggcctttgatgcctcctgatatatgcccccattctctctagctttttctgctcttggcctctcagccaggtctgcaataacccctgtgcaccattaatggtttagagaaaggctctctctctgggtggatgcagcctgtaggtgcctgatttggcaagcagcacataagctcgtctccatcccaccctgcagctgggtgctcttgtgcctggcacagctcatacctgcatattgctgccttggaacaacccatgcagccagctcaaaacttcatccctggactccatctggccattgtccctgctagattagagcttgagtcagacagtttaaataattttgaggaattctctcattttttaaactgatccttgtggtacttttatggcagacgtaaagtaggcacacaataagtgctcaacaaataattaataatctgcctgcctgaaatgcataacctatttagggcagatgaggaaatgaggcatagaggggttgcttgagcaatactatgcagcaaaaaatgtttttgtttatcaacagaagacgcacttaggcaactgagaagagcaggaaacatgtgggtacatgattgtcttttttctaatgagaagggagtaattcttccttttctcaaacttgacgctgttctttgaaggcagtatgttattcttagattaacaaccatgacactcataggattagacgtgcaacttcatggtgaaagaactttggtggcaagaacaggggtacagaatgcaacatttgaaccaagcccaacagtaaacagaaactaagaactaaagtggtttgcccacacaaagattgaatttgtgccaagggtttttccagttctcagaggtgcttaagtgtaaacccagaaagttacctgacatgctcacgtccctgtgtctccgtgatatgctgagactgcaaagttttggtctggtctgctgccccttttttccatagagctctaggcatctcttgctagacataaagctcaggggctgttgaatcaaaggtggtcaaatgtaacaatgtgaggcatccattctagaaagttttgaattctaattgagagagtcaggatgtttctaaactttttctttttcttttccctttagtgatcattaggttaagctgtgactgatcacaagtaaagacctggtgaaaaagtgaacttcttgtttggactaacaagttctctcaaattcacactaattgtacatccaattagaggagttgattgaaaaataccagttcatgtttatgtttatatttttaaagaacttagacttgtaatacatttataaaaccataaaatgctagaaggacatacatatcaaatgtataattgtgtttgtctctgagaagaagagattggaataagaatggatatggaagtcaaagaagttctcaatgctgtatttcttaattttaaacccacttagagcaaatatgaaaaaatattaacagccacagattctgggtaggaaagcacaagttgtaaaatatattttctctgttcttttttttttttgactagatgtttgttttaaagtattttattgctattaaaagaaaacaaaatacaaaagaattggatggaaaagcaaaggctaatctctttatttcagccactaataattgtggtaatcctgggtgttaatccttgaagtcttcatggcattgctgtttatctggtggaaacttatgacgcttagaataggctgagtaacctgtaatatcttgtgtttgacccaggacaccacagtcccaggcacaaagtggttaatttttttcttttttcccattaatgatcattaggttaagctgtgactgataacaagtgaagacctagtaaaatagtgaacttctttggttggaccaacgagttctatcaaactcacacaaattgtatatccaattaaagaagttgattgaaaaatgccagttcatgtttatgtttgtatttaaaaaaatcttagacttgtatatacatttaaaaaaccataaaatgctagaaggacatacatatgaaatgtatgcattaatgtatattaaatgtatgtccttctggcattttatggttttgtaaatgtatacacaaatctaagtgatggcaatgacatttgttcagacccctccaataaggtatttgtataaaggtactgtaattttcatacttactatgataaggataaggttaagcgagtcaaaggtcactttataaaaaatctagctgcttttttacaataatttaaagctctcctggaaacactatacaaggtttaaacaatgagtatttaaacaatgagcccctctatgatggactgggaagcaccatgtgtcaagaggagcatggcaatgctattaaccatagaagcatcaataaaatatgtgtatgttgccaatgaggaccacatttgggttggttcgtttctctaagatatctgtctagccgattcattgtctcaggacattttgttgcccaggatgcagttttctctttcaaatacacatccctgatttttactgagaatatcttccaatgatattttctttgtcagaaattttgcaaataaaagtagaaagaaaaaagggatttgtggagagagagttccaagatggcaggtgatggagtttatggtggcatatgtgccccaaacaaaacgcaggcctgggaagggcctggacagcttttcctggaaataggagactgggaatgggagggagtgtggattcaacatggaccatcttttccagtccttacaccactctgacgttagtaactctaaagcattgcatacgtttgccttcagggctagctgagggggcttctttcctctctccttcaagaaaggagagagggaagagggtctcttgcttctctactcctagcttcttgctgatgggaaacttcagagtttcccatgagaatctaatgccttatgatctgtcactgtctcccatcacccccagatgggatcatgtagttgcaggaaaacaaactcaaggctcccactgatcctacattatggttagttgtgtaattttttcattgtatattacaatatattaatagtagaaataaagtgcacaataaatgtaatgggcttgaatcagccccaaatcataactttccctctcctcggcccatgggaaagttgttttccatgaaactggtctctggtaccaaaaaggctggggaccactggtgtaaatgcttctaagaatagataagcaacttaaggtttacagggtactaaaaatatgggtttaaatgctaataaaactggatgcacatgaaaacactctcttgctgtggtccagtgaatcttgaccattctatcacagagacttgcagctttgagttggagctgccccctggacctcctgtccacagcacacccctgcaacacacacacacatgcacatacatacatgtgcacatacctgcacacatacacacacatgctgtgcttcatgccctcactaaggtggcatgggagggaatgagtgtttttaagagaaatgaagacaactcaggcttcttgttctcctggtgtttgcacaagtgccttctctgcagaccatgcttcaatctctttcttggctttccctgttagtgaaagagacaagcagagccccagcatgtatctgactgcttagggtccaacccaagctcacaagcttcctggggagcctagtgagatgaaggcactgcagagcctcccaaaaagaggcatcagcttttggtggagacttgagcccgggaaggtgggacatcatggttcatcaaagacacaaccaaaatccagtgaggaatggcagccatcaaaagttttattcttcaagagaaggagttctcaggggctgtgggcagcaggcacagagctctttagtgcatgtgtgggcaggtgatggtgacctacagtttgcactgggaactaagatcaagagtgacctgacctctgctcatgcgcatctctccctgtctctctctctaccttttatgtctctctccttatctctctccccacactccctctcagcctcctctgtctctgtctctctccccatctctctttctctctctcactcctttcttcccatgtctctttctctctccttctccacttctctctccctcctcctctccctctctgccactgttcaggctcctgcccacccctccctgctgtgcagagaggcacacgcaggactcctaggctaccttccagggcacacgcacaaggctgccgggacttggtcccagtacagtgcccccacctcccagtgccctcaaggtcaggggtgtggggtgtgcttgtgctctcttgggtgggcaccccactctccaggaagcagaagctgcaggtcactgctggcttgagtggcacgcctattggactgctggcttccatcctgtgatctgccgaggccaaaacagaggacacctgccaaggccccaccctgctccagggttggggtagaggtaggggtagtggtggggatgagagcagccactgcaatctggtccctgcccagcatcctgccctgcaccctgccatgcaaggcctcctctgccaccctttccctgcccctcaccatcttcacccctagaaagccccaggcacaggctccagaaatctccctggatccaggaactaagagcaaccactgggctccacagcccctaggccaggtgtcagccacacccactgcatgctgacaaatcttggctctcacttatgcccccccgcaagccagccacactctgcccccactccccccacttcctgactttagccctgactgacagtgctgcctcctggtaacctttccccctccccacaaggtccaggcaagcccaaatgccagcacccgccacccacccttcctgggtgcccctctattgtctgcttgcctagatgtcttaacctcattttaccaagctagaacaaataacagggatgagcccccagcctctcccaggaagatttggcaaaatgctctccttttagaagcaggagcagtgacaggacctagggatgacccgaggcttgtcacccaagcaacaagaagggcaaggagcccagttttatgacctcaccttgggaggacatggccagggctccacaaggccctgtggggggctggcaggagaacagatccactctccttttgaggaagcaggccccaaccctaggaagcagcagatgggggcacacaggcagagcttccgcaagctgtagatcagggtcagcagatctgcattcagctttagccccaggggagctgcaagacgtgagacactgataggtttggctctgtgtccccacccaaatctcattttgagctgtaatccccatgtgtcaagggaggaacctcatgggaggtgattgtattatagggggctgggttcccccatgctgttcccctgatagtgagtgagttctcaggagagcagatggttttaaagcatggcacttcctcgttttctcactccctcctgctgccttgtgaagaagatgcccgcttccccttcgccttccaccatgattgcaagctttctgaactgtgagtcaattcaacctctttccttgataaattacccagtctcaggtatttcttcatagcagtgtgaaaacaaaacaaactaagacagaccccttctctgaggtgccttcttctgaggccaccagctgcccccatgctcctcctctgccccctggtctttcttttcccctcatgaggcccaagtgatctgcatggccagccccagccccatcctactgcaggcctgtctagctggtggagaggccgacctcctttcctgaccctcaggctggctgatatgctctctggatcctggaggaaactgattgtctctcctcatactggtagcaacttcttccaagaccacaaagctggaaaactggtctttttgttgtctccgcttgctagggctgtagttgggacagtactagaggtgggccaatggatgaatggatggatgagtgggacagtagtccagggaggatgtccctgtctgtccagtttgcatcggctcctgtgcagtcacatagctccctgctagctgagttgaaattaaaacccattcagtctggcttctatatggctcatggggcctgtggactggtctctccttttccctccagaccccatccccattaagtccatgagcaaatcatgtaggtgacatcctcacaatgatcctgaggtgactctactcaccatctgccttctcccacctagtttgagcacccttcattacttacctggaccagccagctggcccccctctcctccctgctggtgtggtgtggcctgttaacacctgagccgcagctgaacccacttctggctaggaccctctgctggctccctggctgctctgagtgacagctagagccttgcaacagcctcagccattgaacctgggacttctgtccctgagctctctgctgcttgcctctgctcacaccaggacagatgcaggcttcccctctgggcctcaggcatgccggtcatgctcctgcctcagggcctttgcatgagccattcccactgcctggaatgctctctgccaagatatctgcttgggtgacccaccacctcctgcaaacattgctcgaaccttgcctcgtcaatgaggactacaaccccggccacgcatctagaaggcatccagcacagagtatgtgctcaatacacagacaaagcaggacaatacatgagacaactgtccctctcccaggcccctgggaaatgctgggatggggaagatattcagatgtcaagaggaatagggcccagtgtcttgattctcattccagtgctcttcctgttcacaggagtggcagggctgcacatttggagcaaaactgagatgagtttcaagggccgctgagcatcttacccacccacagcctttcccagtgttctgggagataaacagctg
